(19) United States
(12) Patent Application Publication
(10) Pub. No.: US 2005/0202442 A1
(43) Pub. Date: Sep. 15, 2005

(54) Novel therapeutic targets in cancer

(76) Inventors: David W. Morris, Davis, CA (US); Marc S. Malandro, Gibsonia, PA (US)

Correspondence Address: Lisa E. Alexander;Sagres Discovery, Inc., c/o Chiron Corporation, P.O. Box 8097, Emeryville, CA, 94662-8097, US

(21) Appl. No.: 10/737,318

(22) Filed: Dec. 15, 2003

(51) Int. Cl. C12Q 1/68; G01N 33/574; G06F 19/00; G01N 33/48; G01N 33/50; C07H 21/04; C12N 15/09; C07K 14/82; C07K 16/30

(52) U.S. Cl. 435/6; 435/7.23; 435/69.1; 435/320.1; 435/325; 530/350; 530/388.8; 536/23.5; 702/19

(57) ABSTRACT

The present invention relates to novel sequences for use in detection, diagnosis and treatment of cancers, especially lymphomas. The invention provides cancer-associated (CA) polynucleotide sequences whose expression is associated with cancer. The present invention provides CA polypeptides associated with cancer that are present on the cell surface and present novel therapeutic targets against cancer. The present invention further provides diagnostic compositions and methods for the detection of cancer. The present invention provides monoclonal and polyclonal antibodies specific for the CA polypeptides. The present invention also provides diagnostic tools and therapeutic compositions and methods for screening, prevention and treatment of cancer.

### CROSS-REFERENCE TO RELATED APPLICATIONS

[0001] This application is related to the following U.S. Applications: U.S. Ser. No. 10/034,650, filed Dec. 20, 2001; U.S. Ser. No. 10/035,832, filed Dec. 26, 2001; U.S. Ser. No. 10/004,113, filed Oct. 23, 2001; U.S. Ser. No. 09/997,722, filed Nov. 30,2001; U.S. Ser. No. 10/085,117, filed Feb. 27,2002; U.S. Ser. No. 10/087,192, filed Mar. 1, 2002; U.S. Ser. No. 10/322,281, filed Dec. 17, 2002; U.S. Ser. No. 10/322,696, filed Dec. 17, 2002, U.S. Ser. No. 10/331,053, filed Dec. 26, 2002; U.S. Ser. No. 10/330,773, filed Dec. 27, 2002; U.S. Ser. No. 10/367,094, filed Feb. 14, 2003; U.S. Ser. No. 10/388,838, filed Mar. 14, 2003, U.S. Ser. No. 10/417,375 filed Apr. 15, 2003, U.S. Ser. No. 10/461,862, filed Jun. 13, 2003, U.S. Ser. No. 10/663,431 filed Sep. 15, 2003, U.S. Ser. No. 10/669,920 filed Sep. 23, 2003, U.S. Ser. No. 10/670,914 filed Sep. 24, 2003, U.S. Ser. No. 10/674,575, filed Sep. 29, 2003, U.S. Ser. No. 10/676,684 filed Sep. 30, 2003, and U.S. Ser. No. 10/692,382 filed Oct. 22, 2003, all of which are expressly incorporated herein by reference in their entirety.

### DESCRIPTION OF ACCOMPANYING CD-ROMs

[0002] Tables 1-10 are filed herewith in CD-ROM in accordance with 37 C.F.R. §§ 1.52 and 1.58. Two identical copies (marked “Copy 1” and “Copy 2”) of this CD-ROM are submitted.

[0003] Contents of the CD-ROM disks submitted herewith are hereby incorporated by reference into the Specification.

### TECHNICAL FIELD OF THE INVENTION

[0004] This invention relates generally to the field of cancer-associated genes. Specifically, it relates to novel sequences for use in diagnosis and treatment of cancer and tumors, as well as the use of the novel compositions in screening methods. The present invention provides methods of using cancer associated polynucleotides, their corresponding gene products and antibodies specific for the gene products in the detection, diagnosis, prevention and/or treatment of associated cancers.

### BACKGROUND OF THE INVENTION

[0005] Oncogenes are genes that can cause cancer. Carcinogenesis can occur by a wide variety of mechanisms, including infection of cells by viruses containing oncogenes, activation of protooncogenes in the host genome, and mutations of protooncogenes and tumor suppressor genes. Carcinogenesis is fundamentally driven by somatic cell evolution (i.e. mutation and natural selection of variants with progressive loss of growth control). The genes that serve as targets for these somatic mutations are classified as either protooncogenes or tumor suppressor genes, depending on whether their mutant phenotypes are dominant or recessive, respectively.

[0006] There are a number of viruses known to be involved in human cancer as well as in animal cancer. Of particular interest here are viruses that do not contain oncogenes themselves; these are slow-transforming retroviruses. They induce tumors by integrating into the host genome and affecting neighboring protooncogenes in a variety of ways. Provirus insertion mutation is a normal consequence of the retroviral life cycle. In infected cells, a DNA copy of the retrovirus genome (called a provirus) is integrated into the host genome. A newly integrated provirus can affect gene expression in cis at or near the integration site by one of two mechanisms. Type I insertion mutations up-regulate transcription of proximal genes as a consequence of regulatory sequences (enhancers and/or promoters) within the proviral long terminal repeats (LTRs). Type II insertion mutations cause truncation of coding regions due to either integration directly within an open reading frame or integration within an intron flanked on both sides by coding sequences. The analysis of sequences at or near the insertion sites has led to the identification of a number of new protooncogenes.

[0007] With respect to lymphoma and leukemia, retroviruses such as AKV murine leukemia virus (MLV) or SL3-3 MLV, are potent inducers of tumors when inoculated into susceptible newborn mice, or when carried in the germline. A number of sequences have been identified as relevant in the induction of lymphoma and leukemia by analyzing the insertion sites; see Sorensen et al., J. of Virology 74:2161 (2000); Hansen et al., Genome Res. 10(2):237-43 (2000); Sorensen et al., J. Virology 70:4063 (1996); Sorensen et al., J. Virology 67:7118 (1993); Joosten et al., Virology 268:308 (2000); and Li et al., Nature Genetics 23:348 (1999); all of which are expressly incorporated by reference herein. With respect to cancers, especially breast cancer, prostate cancer and cancers with epithelial origin, the mammalian retrovirus, mouse mammary tumor virus (MMTV) is a potent inducer of tumors when inoculated into susceptible newborn mice, or when carried in the germ line. Mammary Tumors in the Mouse, edited by J. Hilgers and M. Sluyser; Elsevier/North-Holland Biomedical Press; New York, N.Y.

[0008] The pattern of gene expression in a particular living cell is characteristic of its current state. Nearly all differences in the state or type of a cell are reflected in the differences in RNA levels of one or more genes. Comparing expression patterns of uncharacterized genes may provide clues to their function. High throughput analysis of expression of hundreds or thousands of genes can help in (a) identification of complex genetic diseases, (b) analysis of differential gene expression over time, between tissues and disease states, and (c) drug discovery and toxicology studies. Increase or decrease in the levels of expression of certain genes correlate with cancer biology. For example, oncogenes are positive regulators of tumorigenesis, while tumor suppressor genes are negative regulators of tumorigenesis. (Marshall, Cell, 64: 313-326 (1991); Weinberg, Science, 254: 1138-1146 (1991)).

[0009] Accordingly, it is an object of the invention to provide polynucleotide and polypeptide sequences involved in cancer and, in particular, in oncogenesis.

[0010] Immunotherapy, or the use of antibodies for therapeutic purposes has been used in recent years to treat cancer. Passive immunotherapy involves the use of monoclonal antibodies in cancer treatments. See for example, Cancer: Principles and Practice of Oncology, 6^{th} Edition (2001) Chapt. 20 pp. 495-508. Inherent therapeutic biological activity of these antibodies include direct inhibition of tumor cell growth or survival, and the ability to recruit the natural cell killing activity of the body's immune system. These agents are administered alone or in conjunction with radiation or chemotherapeutic agents. Rituxan® and Herceptin®, approved for treatment of lymphoma and breast cancer, respectively, are two examples of such therapeutics. Alternatively, antibodies are used to make antibody conjugates where the antibody is linked to a toxic agent and directs that agent to the tumor by specifically binding to the tumor. Mylotarg® is an example of an approved antibody conjugate used for the treatment of leukemia.

[0011] Accordingly, it is another object of this invention to provide antigens (cancer-associated polypeptides) associated with a variety of cancers as targets for diagnostic and/or therapeutic antibodies. These antigens are also useful for drug discovery (e.g., small molecules) and for further characterization of cellular regulation, growth, and differentiation.

### SUMMARY OF THE INVENTION

[0012] In accordance with the objects outlined above, the present invention provides methods for screening for compositions that modulate cancer, especially lymphoma and leukemia. The present invention also provides methods for screening for compositions which modulate carcinomas, especially mammary adenocarcinomas. Also provided herein are methods of inhibiting proliferation of a cell, preferably a lymphoma cell or a breast cancer cell. Methods of treatment of cancer, including diagnosis, are also provided herein.

[0013] In one aspect, a method of screening drug candidates comprises providing a cell that expresses a cancer-associated (CA) gene or fragments thereof. Preferred embodiments of CA genes are genes that are differentially expressed in cancer cells, preferably lymphatic, breast, prostate or epithelial cells, compared to other cells. Preferred embodiments of CA genes used in the methods herein include, but are not limited to the nucleic acids selected from Tables 1-10 (human genomic sequences of SEQ ID NOS: 4, 16, 24, 30, 36, 42, 54, 68, 80, and 88, and sequences of SEQ ID NOS: 5, 7, 9, 11, 17, 19, 25, 31, 37, 43, 45, 55, 57, 59, 61, 63, 69, 71, 73, 75, 81, 89, and 91 corresponding to the human mRNAs generated therefrom). The methods further include adding a drug candidate to the cell and determining the effect of the drug candidate on the expression of the CA gene.

[0014] In one embodiment, the method of screening drug candidates includes comparing the level of expression in the absence of the drug candidate to the level of expression in the presence of the drug candidate.

[0015] Also provided herein is a method of screening for a bioactive agent capable of binding to a CA protein (CAP), the method comprising combining the CAP and a candidate bioactive agent, and determining the binding of the candidate agent to the CAP.

[0016] Further provided herein is a method for screening for a bioactive agent capable of modulating the activity of a CAP. In one embodiment, the method comprises combining the CAP and a candidate bioactive agent, and determining the effect of the candidate agent on the bioactivity of the CAP.

[0017] Also provided is a method of evaluating the effect of a candidate cancer drug comprising administering the drug to a patient and removing a cell sample from the patient. The expression profile of the cell is then determined. This method may further comprise comparing the expression profile of the patient to an expression profile of a healthy individual.

[0018] In a further aspect, a method for inhibiting the activity of a CA protein is provided. In one embodiment, the method comprises administering to a patient an inhibitor of a CA protein preferably selected from the group consisting of the sequences outlined in Tables 1-10 (SEQ ID NOS: 6, 8, 10, 12, 18, 20, 26, 32, 38, 44, 46, 56, 58, 60, 62, 64, 70, 72, 74, 76, 82, 90, and 92).

[0019] A method of neutralizing the effect of a CA protein, preferably a protein encoded by a nucleic acid selected from the group of sequences outlined in Tables 1-10 (human genomic sequences of SEQ ID NOS: 4, 16, 24, 30, 36, 42, 54, 68, 80, and 88, and sequences of SEQ ID NOS: 5, 7, 9, 11, 17, 19, 25, 31, 37, 43, 45, 55, 57, 59, 61, 63, 69, 71, 73, 75, 81, 89, and 91 corresponding to the human mRNAs generated therefrom), is also provided. Preferably, the method comprises contacting an agent specific for said protein with said protein in an amount sufficient to effect neutralization.

[0020] Moreover, provided herein is a biochip comprising a nucleic acid segment which encodes a CA protein, preferably selected from the sequences outlined in Tables 1-10 (SEQ ID NOS: 5, 7, 9, 11, 17, 19, 25, 31, 37, 43, 45, 55, 57, 59, 61, 63, 69, 71, 73, 75, 81, 89, and 91).

[0021] Also provided herein is a method for diagnosing or determining the propensity to cancers, especially lymphoma or leukemia or carcinoma by sequencing at least one carcinoma or lymphoma gene of an individual. In yet another aspect of the invention, a method is provided for determining cancer including lymphoma and leukemia gene copy numbers in an individual.

[0022] The invention provides an isolated nucleic acid comprising at least 10, 12, 15, 20 or 30 contiguous nucleotides of a sequence selected from the group consisting of the polynucleotide sequences SEQ ID NOS: 5, 7, 9, 11, 17, 19, 25, 31, 37, 43, 45, 55, 57, 59, 61, 63, 69, 71, 73, 75, 81, 89, and 91 shown in Tables 1-10, or its complement, or an expression vector comprising the isolated nucleic acids and host cells comprising them.

[0023] In some embodiments, the polynucleotide, or its complement or a fragment thereof, further comprises a detectable label, is attached to a solid support, is prepared at least in part by chemical synthesis, is an antisense fragment, is single stranded, is double stranded or comprises a microarray.

[0024] The invention provides an isolated polypeptide, encoded within an open reading frame of a CA sequence selected from the group consisting of the polynucleotide sequences of SEQ ID NOS: 4, 16, 24, 30, 36, 42, 54, 68, 80, and 88 shown in Tables 1-10, or its complement. The invention provides an isolated polypeptide, wherein said polypeptide comprises the amino acid sequence encoded by a polynucleotide selected from the group consisting of SEQ ID NOS: 5, 7, 9, 11, 17, 19, 25, 31, 37, 43, 45, 55, 57, 59, 61, 63, 69, 71, 73, 75, 81, 89, and 91 shown in Tables 1-10. The invention provides an isolated polypeptide, wherein said polypeptide comprises the amino acid sequence encoded by a polypeptide selected from the group consisting of SEQ ID NOS: 6, 8, 10, 12, 18, 20, 26, 32, 38, 44, 46, 56, 58, 60, 62, 64, 70, 72, 74, 76, 82, 90, and 92 shown in Tables 1-10.

[0025] The invention further provides an isolated polypeptide, comprising the amino acid sequence of an epitope of the amino acid sequence of a CA polypeptide selected from the group consisting of SEQ ID NOS: 6, 8, 10, 12, 18, 20, 26, 32, 38, 44, 46, 56, 58, 60, 62, 64, 70, 72, 74, 76, 82, 90, and 92 shown in Tables 1-10, wherein the polypeptide or fragment thereof may be attached to a solid support. In one embodiment the invention provides an isolated antibody (monoclonal or polyclonal) or antigen binding fragment thereof, that binds to such a polypeptide. The isolated antibody or antigen binding fragment thereof may be attached to a solid support, or further comprises a detectable label.

[0026] In one embodiment, the invention provides a kit for diagnosing the presence of cancer in a test sample, said kit comprising at least one polynucleotide that selectively hybridizes to a CA polynucleotide sequence shown in Tables 1-10, or its complement. In another embodiment. the invention provides an electronic library comprising a CA polynucleotide, a CA polypeptide, or fragment thereof, shown in Tables 1-10.

[0027] In one embodiment, the invention provides a method of screening for anticancer activity comprising: (a) providing a cell that expresses a cancer associated (CA) gene encoded by a nucleic acid sequence selected from the group consisting of the CA sequences shown in Tables 1-10, or fragment thereof; (b) contacting a tissue sample derived from a cancer cell with an anticancer drug candidate; (c) monitoring an effect of the anticancer drug candidate on an expression of the CA polynucleotide in the tissue sample, and optionally (d) comparing the level of expression in the absence of said drug candidate to the level of expression in the presence of the drug candidate.

[0028] In one embodiment, the invention provides a method for detecting cancer associated with expression of a polypeptide in a test cell sample, comprising the steps of: (i) detecting a level of expression of at least one polypeptide selected from the group consisting of SEQ ID NOS: 6, 8, 10, 12, 18, 20, 26, 32, 38, 44, 46, 56, 58, 60, 62, 64, 70, 72, 74, 76, 82, 90, and 92 shown in Tables 1-10, or a fragment thereof; and (ii) comparing the level of expression of the polypeptide in the test sample with a level of expression of polypeptide in a normal cell sample, wherein an altered level of expression of the polypeptide in the test cell sample relative to the level of polypeptide expression in the normal cell sample is indicative of the presence of cancer in the test cell sample.

[0029] In another embodiment, the invention provides a method for detecting cancer associated with expression of a polypeptide in a test cell sample, comprising the steps of: (i) detecting a level of activity of at least one polypeptide selected from the group consisting of SEQ ID NOS: 6, 8, 10, 12, 18, 20, 26, 32, 38, 44, 46, 56, 58, 60, 62, 64, 70, 72, 74, 76, 82, 90, and 92 shown in Tables 1-10, or a fragment thereof, wherein said activity corresponds to at least one activity for the polypeptide listed in Table 12; and (ii) comparing the level of activity of the polypeptide in the test sample with a level of activity of polypeptide in a normal cell sample, wherein an altered level of activity of the polypeptide in the test cell sample relative to the level of polypeptide activity in the normal cell sample is indicative of the presence of cancer in the test cell sample.

[0030] In another embodiment, the invention provides a method for detecting cancer associated with the presence of an antibody in a test serum sample, comprising the steps of: (i) detecting a level of an antibody against an antigenic polypeptide selected from the group consisting of SEQ ID NOS: 6, 8, 10, 12, 18, 20, 26, 32, 38, 44, 46, 56, 58, 60, 62, 64, 70, 72, 74, 76, 82, 90, and 92 shown in Tables 1-10, or antigenic fragment thereof; and (ii) comparing said level of said antibody in the test sample with a level of said antibody in the control sample, wherein an altered level of antibody in said test sample relative to the level of antibody in the control sample is indicative of the presence of cancer in the test serum sample.

[0031] The invention provides a method for screening for a bioactive agent capable of modulating the activity of a CA protein (CAP), wherein said CAP is encoded by a nucleic acid comprising a nucleic acid sequence selected from the group consisting of the polynucleotide sequences SEQ ID NOS: 5, 7, 9, 11, 17, 19, 25, 31, 37, 43, 45, 55, 57, 59, 61, 63, 69, 71, 73, 75, 81, 89, and 91 shown in Tables 1-10, said method comprising: a) combining said CAP and a candidate bioactive agent; and b) determining the effect of the candidate agent on the bioactivity of said CAP. According to the method the bioactive agent: affects the expression of the CA protein (CAP); affects the activity of the CA protein (CAP), wherein such activity is selected from the activities listed in Table 12.

[0032] In one embodiment, the invention provides a method for diagnosing cancer comprising: a) determining the expression of one or more genes comprising a nucleic acid sequence selected from the group consisting of the human genomic and mRNA sequences outlined in Tables 1-10, in a first tissue type of a first individual; and b) comparing said expression of said gene(s) from a second normal tissue type from said first individual or a second unaffected individual; wherein a difference in said expression indicates that the first individual has cancer.

[0033] In another embodiment the invention provides a method for treating cancers comprising administering to a patient a bioactive agent modulating the activity of a CA protein (CAP), wherein said CAP is encoded by a nucleic acid comprising a nucleic acid sequence selected from the group consisting of the human nucleic acid sequences in Tables 1-10 and further wherein the bioactive agent binds to the CA protein, wherein the CA protein: is a signalling protein wherein the CAP sequence is selected from the group consisting of SEQ ID NOS: 6, 8, 10, 12, 32, 38, 38, 90 and 92; is a cell adhesion protein wherein the CAP sequence is selected from the group consisting of SEQ ID NOS: 6, 8, 10, 12, 44, 46 and 82; is a serine protease inhibitor wherein the CAP sequence is selected from the group consisting of SEQ ID NOS: 18 and 20; is an ion transport protein wherein the CAP sequence is selected from the group consisting of SEQ ID NOS: 56, 58, 60, 62 and 64; is a major histocompatility antigen wherein the CAP sequence is selected from the group consisting of SEQ ID NOS: 70, 72, 74 and 76 as shown in Tables 1-10.

[0034] The invention provides monoclonal antibodies that preferentially binds to a CA protein (CAP) that is expressed on a cell surface, wherein the CA protein selected from the group consisting of SEQ ID NOS: 6, 8, 10, 12, 18, 20, 26, 32, 38, 44, 46, 56, 58, 60, 62, 64, 70, 72, 74, 76, 82, 90, and 92; preferably to the extracellular domain of the CA protein; preferably to a CA protein differentially expressed on a cancer cell surface relative to a normal cell surface or preferably to at least one human cancer cell line; preferably linked to a therapeutic agent; or preferably humanized. Kits and pharmaceutical compositions for detecting a presence or an absence of cancer cells in an individual, and comprising such antibodies are also provided.

[0035] The invention also provides a method for detecting a presence or an absence of cancer cells in an individual, the method comprising: contacting cells from the individual with the antibody according to the invention; and detecting a complex of a CAP from the cancer cells and the antibody, wherein detection of the complex correlates with the presence of cancer cells in the individual. In one embodiment the invention provides a method for inhibiting growth of cancer cells in an individual, the method comprising: administering to the individual an effective amount of a pharmaceutical composition according to the invention. In another embodiment the invention provides a method for delivering a therapeutic agent to cancer cells in an individual, the method comprising: administering to the individual an effective amount of a pharmaceutical composition according to according to the invention.

[0036] Novel sequences associated with cancer are also provided herein. Other aspects of the invention will become apparent to the skilled artisan by the following description of the invention.

### BRIEF DESCRIPTION OF THE FIGURES

[0037] FIG. 1 depicts PCR amplification of host-provirus junction fragments.

[0038] FIG. 2 shows an example of average threshold cycle (CT) values for a housekeeper gene and target gene.

[0039] FIG. 3 shows an example of the calculated difference (AACT) between the CT values of target and housekeeper genes (ACT) for various samples.

[0040] FIG. 4 shows the AACT and comparative expression level for each sample from FIG. 3.

### DETAILED DESCRIPTION OF PREFERRED EMBODIMENTS

[0041] The present invention is directed to a number of sequences associated with cancers, especially lymphoma, breast cancer or prostate cancer. The relatively tight linkage between clonally-integrated proviruses and protooncogenes forms “provirus tagging”, in which slow-transforming retroviruses that act by an insertion mutation mechanism are used to isolate protooncogenes. In some models, uninfected animals have low cancer rates, and infected animals have high cancer rates. It is known that many of the retroviruses involved do not carry transduced host protooncogenes or pathogenic trans-acting viral genes, and thus the cancer incidence must therefore be a direct consequence of proviral integration effects into host protooncogenes. Since proviral integration is random, rare integrants will “activate” host protooncogenes that provide a selective growth advantage, and these rare events result in new proviruses at clonal stoichiometries in tumors. In contrast to mutations caused by chemicals, radiation, or spontaneous errors, protooncogene insertion mutations can be easily located by virtue of the fact that a convenient-sized genetic marker of known sequence (the provirus) is present at the site of mutation. Host sequences that flank clonally integrated proviruses can be cloned using a variety of strategies. Once these sequences are in hand, the tagged protooncogenes can be subsequently identified. The presence of provirus at the same locus in two or more independent tumors is prima facie evidence that a protooncogene is present at or very near the provirus integration sites. This is because the genome is too large for random integrations to result in observable clustering. Any clustering that is detected is unequivocal evidence for biological selection (i.e. the tumor phenotype). Moreover, the pattern of proviral integrants (including orientations) provides compelling positional information that makes localization of the target gene at each cluster relatively simple. The three mammalian retroviruses that are known to cause cancer by an insertion mutation mechanism are FeLV (leukemia/lymphoma in cats), MLV (leukemia/lymphoma in mice and rats), and MMTV (mammary cancer in mice).

[0042] Thus, the use of oncogenic retroviruses, whose sequences insert into the genome of the host organism resulting in cancer, allows the identification of host sequences involved in cancer. These sequences may then be used in a number of different ways, including diagnosis, prognosis, screening for modulators (including both agonists and antagonists), antibody generation (for immunotherapy and imaging), etc. However, as will be appreciated by those in the art, oncogenes that are identified in one type of cancer such as lymphoma or leukemia have a strong likelihood of being involved in other types of cancers as well. Thus, while the sequences outlined herein are initially identified as correlated with lymphoma, they can also be found in other types of cancers as well, outlined below.

Definitions

[0043] Accordingly, the present invention provides nucleic acid and protein sequences that are associated with cancer, herein termed “cancer associated” or “CA” sequences. In one embodiment, the present invention provides nucleic acid and protein sequences that are associated with cancers that originate in lymphatic tissue, herein termed “lymphoma associated,” “leukemia associated” or “LA” sequences. In another embodiment, the present invention provides nucleic acid and protein sequences that are associated with carcinomas which originate in breast tissue, herein termed “breast cancer associated” or “BC” sequences.

[0044] Suitable cancers that can be diagnosed or screened for using the methods of the present invention include cancers classified by site or by histological type. Cancers classified by site include cancer of the oral cavity and pharynx (lip, tongue, salivary gland, floor of mouth, gum and other mouth, nasopharynx, tonsil, oropharynx, hypopharynx, other oral/pharynx); cancers of the digestive system (esophagus; stomach; small intestine; colon and rectum; anus, anal canal, and anorectum; liver; intrahepatic bile duct; gallbladder; other biliary; pancreas; retroperitoneum; peritoneum, omentum, and mesentery; other digestive); cancers of the respiratory system (nasal cavity, middle ear, and sinuses; larynx; lung and bronchus; pleura; trachea, mediastinum, and other respiratory); cancers of the mesothelioma; bones and joints; and soft tissue, including heart; skin cancers, including melanomas and other non-epithelial skin cancers; Kaposi's sarcoma and breast cancer; cancer of the female genital system (cervix uteri; corpus uteri; uterus, nos; ovary; vagina; vulva; and other female genital); cancers of the male genital system (prostate gland; testis; penis; and other male genital); cancers of the urinary system (urinary bladder; kidney and renal pelvis; ureter; and other urinary); cancers of the eye and orbit; cancers of the brain and nervous system (brain; and other nervous system); cancers of the endocrine system (thyroid gland and other endocrine, including thymus); lymphomas (Hodgkin's disease and non-Hodgkin's lyrnphoma), multiple myeloma, and leukemias (lymphocytic leukemia; myeloid leukemia; monocytic leukemia; and other leukemias).

[0045] Other cancers, classified by histological type, that may be associated with the sequences of the invention include, but are not limited to, Neoplasm, malignant; Carcinoma, NOS; Carcinoma, undifferentiated, NOS; Giant and spindle cell carcinoma; Small cell carcinoma, NOS; Papillary carcinoma, NOS; Squamous cell carcinoma, NOS; Lymphoepithelial carcinoma; Basal cell carcinoma, NOS; Pilomatrix carcinoma; Transitional cell carcinoma, NOS; Papillary transitional cell carcinoma; Adenocarcinoma, NOS; Gastrinoma, malignant; Cholangiocarcinoma; Hepatocellular carcinoma, NOS; Combined hepatocellular carcinoma and cholangiocarcinoma; Trabecular adenocarcinoma; Adenoid cystic carcinoma; Adenocarcinoma in adenomatous polyp; Adenocarcinoma, familial polyposis coli; Solid carcinoma, NOS; Carcinoid tumor, malignant; Bronchiolo-alveolar adenocarcinoma; Papillary adenocarcinoma, NOS; Chromophobe carcinoma; Acidophil carcinoma; Oxyphilic adenocarcinoma; Basophil carcinoma; Clear cell adenocarcinoma, NOS; Granular cell carcinoma; Follicular adenocarcinoma, NOS; Papillary and follicular adenocarcinoma; Nonencapsulating sclerosing carcinoma; Adrenal cortical carcinoma; Endometroid carcinoma; Skin appendage carcinoma; Apocrine adenocarcinoma; Sebaceous adenocarcinoma; Ceruminous adenocarcinoma; Mucoepidermoid carcinoma; Cystadenocarcinoma, NOS; Papillary cystadenocarcinoma, NOS; Papillary serous cystadenocarcinoma; Mucinous cystadenocarcinoma, NOS; Mucinous adenocarcinoma; Signet ring cell carcinoma; Infiltrating duct carcinoma; Medullary carcinoma, NOS; Lobular carcinoma; Inflammatory carcinoma; Paget's disease, mammary; Acinar cell carcinoma; Adenosquamous carcinoma; Adenocarcinoma w/squamous metaplasia; Thymoma, malignant; Ovarian stromal tumor, malignant; Thecoma, malignant; Granulosa cell tumor, malignant; Androblastoma, malignant; Sertoli cell carcinoma; Leydig cell tumor, malignant; Lipid cell tumor, malignant; Paraganglioma, malignant; Extra-mammary paraganglioma, malignant; Pheochromocytoma; Glomangiosarcoma; Malignant melanoma, NOS; Amelanotic melanoma; Superficial spreading melanoma; Malig melanoma in giant pigmented nevus; Epithelioid cell melanoma; Blue nevus, malignant; Sarcoma, NOS; Fibrosarcoma, NOS; Fibrous histiocytoma, malignant; Myxosarcoma; Liposarcoma, NOS; Leiomyosarcoma, NOS; Rhabdomyosarcoma, NOS; Embryonal rhabdomyosarcoma; Alveolar rhabdomyosarcoma; Stromal sarcoma, NOS; Mixed tumor, malignant, NOS; Mullerian mixed tumor; Nephroblastoma; Hepatoblastoma; Carcinosarcoma, NOS; Mesenchymoma, malignant; Brenner tumor, malignant; Phyllodes tumor, malignant; Synovial sarcoma, NOS; Mesothelioma, malignant; Dysgerminoma; Embryonal carcinoma, NOS; Teratoma, malignant, NOS; Struma ovarii, malignant; Choriocarcinoma; Mesonephroma, malignant; Hemangiosarcoma; Hemangioendothelioma, malignant; Kaposi's sarcoma; Hemangiopericytoma, malignant; Lymphangiosarcoma; Osteosarcoma, NOS; Juxtacortical osteosarcoma; Chondrosarcoma, NOS; Chondroblastoma, malignant; Mesenchymal chondrosarcoma; Giant cell tumor of bone; Ewing's sarcoma; Odontogenic tumor, malignant; Ameloblastic odontosarcoma; Ameloblastoma, malignant; Ameloblastic fibrosarcoma; Pinealoma, malignant; Chordoma; Glioma, malignant; Ependymoma, NOS; Astrocytoma, NOS; Protoplasmic astrocytoma; Fibrillary astrocytoma; Astroblastoma; Glioblastoma, NOS; Oligodendroglioma, NOS; Oligodendroblastoma; Primitive neuroectodermal; Cerebellar sarcoma, NOS; Ganglioneuroblastoma; Neuroblastoma, NOS; Retinoblastoma, NOS; Olfactory neurogenic tumor; Meningioma, malignant; Neurofibrosarcoma; Neurilemmoma, malignant; Granular cell tumor, malignant; Malignant lymphoma, NOS; Hodgkin's disease, NOS; Hodgkin's; paragranuloma, NOS; Malignant lymphoma, small lymphocytic; Malignant lymphoma, large cell, diffuse; Malignant lymphoma, follicular, NOS; Mycosis fungoides; Other specified non-Hodgkin's lymphomas; Malignant histiocytosis; Multiple myeloma; Mast cell sarcoma; Immunoproliferative small intestinal disease; Leukemia, NOS; Lymphoid leukemia, NOS; Plasma cell leukemia; Erythroleukemia; Lymphosarcoma cell leukemia; Myeloid leukemia, NOS; Basophilic leukemia; Eosinophilic leukemia; Monocytic leukemia, NOS; Mast cell leukemia; Megakaryoblastic leukemia; Myeloid sarcoma; and Hairy cell leukemia.

[0046] In addition, the CA genes may be involved in other diseases such as, but not limited to, diseases associated with aging or neurodegeneration.

[0047] “Association” in this context means that the nucleotide or protein sequences are either differentially expressed, activated, inactivated or altered in cancers as compared to normal tissue. As outlined below, CA sequences include those that are up-regulated (i.e. expressed at a higher level), as well as those that are down-regulated (i.e. expressed at a lower level), in cancers. CA sequences also include sequences that have been altered (i.e., truncated sequences or sequences with substitutions, deletions or insertions, including point mutations) and show either the same expression profile or an altered profile. In a preferred embodiment, the CA sequences are from humans; however, as will be appreciated by those in the art, CA sequences from other organisms may be useful in animal models of disease and drug evaluation; thus, other CA sequences are provided, from vertebrates, including mammals, including rodents (rats, mice, hamsters, guinea pigs, etc.), primates, and farm animals (including sheep, goats, pigs, cows, horses, etc). In some cases, prokaryotic CA sequences may be useful. CA sequences from other organisms may be obtained using the techniques outlined below.

[0048] CA sequences include both nucleic acid and amino acid sequences. In a preferred embodiment, the CA sequences are recombinant nucleic acids. By the term “recombinant nucleic acid” herein is meant nucleic acid, originally formed in vitro, in general, by the manipulation of nucleic acid by polymerases and endonucleases, in a form not normally found in nature. Thus a recombinant nucleic acid is also an isolated nucleic acid, in a linear form, or cloned in a vector formed in vitro by ligating DNA molecules that are not normally joined, are both considered recombinant for the purposes of this invention. It is understood that once a recombinant nucleic acid is made and reintroduced into a host cell or organism, it will replicate using the in vivo cellular machinery of the host cell rather than in vitro manipulations; however, such nucleic acids, once produced recombinantly, although subsequently replicated in vivo, are still considered recombinant or isolated for the purposes of the invention. As used herein a “polynucleotide” or “nucleic acid” is a polymeric form of nucleotides of any length, either ribonucleotides or deoxyribonucleotides. This term refers only to the primary structure of the molecule. Thus, this term includes double- and single-stranded DNA and RNA. It also includes known types of modifications, for example, labels which are known in the art, methylation, “caps”, substitution of one or more of the naturally occurring nucleotides with an analog, intemucleotide modifications such as, for example, those with uncharged linkages (e.g., phosphorothioates, phosphorodithioates, etc.), those containing pendant moieties, such as, for example proteins (including e.g., nucleases, toxins, antibodies, signal peptides, poly-L-lysine, etc.),those with intercalators (e.g., acridine, psoralen, etc.), those containing chelators (e.g., metals, radioactive metals, etc.), those containing alkylators, those with modified linkages (e.g., alpha anomeric nucleic acids, etc.), as well as unmodified forms of the polynucleotide.

[0049] As used herein, a polynucleotide “derived from” a designated sequence refers to a polynucleotide sequence which is comprised of a sequence of approximately at least about 6 nucleotides, preferably at least about 8 nucleotides, more preferably at least about 10-12 nucleotides, and even more preferably at least about 15-20 nucleotides corresponding to a region of the designated nucleotide sequence. “Corresponding” means homologous to or complementary to the designated sequence. Preferably, the sequence of the region from which the polynucleotide is derived is homologous to or complementary to a sequence that is unique to a CA gene.

[0050] Similarly, a “recombinant protein” is a protein made using recombinant techniques, i.e. through the expression of a recombinant nucleic acid as depicted above. A recombinant protein is distinguished from naturally occurring protein by at least one or more characteristics. For example, the protein may be isolated or purified away from some or all of the proteins and compounds with which it is normally associated in its wild type host, and thus may be substantially pure. For example, an isolated protein is unaccompanied by at least some of the material with which it is normally associated in its natural state, preferably constituting at least about 0.5%, more preferably at least about 5% by weight of the total protein in a given sample. A substantially pure protein comprises about 50-75% by weight of the total protein, with about 80% being preferred, and about 90% being particularly preferred. The definition includes the production of a CA protein from one organism in a different organism or host cell. Alternatively, the protein may be made at a significantly higher concentration than is normally seen, through the use of an inducible promoter or high expression promoter, such that the protein is made at increased concentration levels. Alternatively, the protein may be in a form not normally found in nature, as in the addition of an epitope tag or amino acid substitutions, insertions and deletions, as discussed below.

[0051] In a preferred embodiment, the CA sequences are nucleic acids. As will be appreciated by those in the art and is more fully outlined below, CA sequences are useful in a variety of applications, including diagnostic applications, which will detect naturally occurring nucleic acids, as well as screening applications; for example, biochips comprising nucleic acid probes to the CA sequences can be generated. In the broadest sense, use of “nucleic acid,” “polynucleotide” or “oligonucleotide” or equivalents herein means at least two nucleotides covalently linked together. In some embodiments, an oligonucleotide is an oligomer of 6, 8, 10, 12, 20, 30 or up to 100 nucleotides. A “polynucleotide” or “oligonucleotide” may comprise DNA, RNA, PNA or a polymer of nucleotides linked by phosphodiester and/or any alternate bonds.

[0052] A nucleic acid of the present invention generally contains phosphodiester bonds, although in some cases, as outlined below (for example, in antisense applications or when a nucleic acid is a candidate drug agent), nucleic acid analogs may have alternate backbones, comprising, for example, phosphoramidate (Beaucage et al., Tetrahedron 49(10):1925 (1993) and references therein; Letsinger, J. Org. Chem. 35:3800 (1970); Sprinzl et al., Eur. J. Biochem. 81:579 (1977); Letsinger et al., Nucl. Acids Res. 14:3487 (1986); Sawai et al, Chem. Lett. 805 (1984), Letsinger et al., J. Am. Chem. Soc. 110:4470 (1988); and Pauwels et al., Chemica Scripta 26:141 91986)), phosphorothioate (Mag et al., Nucleic Acids Res. 19:1437 (1991); and U.S. Pat. No. 5,644,048), phosphorodithioate (Briu et al., J. Am. Chem. Soc. 111:2321 (1989), O-methylphosphoroamidite linkages (see Eckstein, Oligonucleotides and Analogues: A Practical Approach, Oxford University Press), and peptide nucleic acid backbones and linkages (see Egholm, J. Am. Chem. Soc. 114:1895 (1992); Meier et al., Chem. Int. Ed. Engl. 31:1008 (1992); Nielsen, Nature, 365:566 (1993); Carlsson et al., Nature 380:207 (1996), all of which are incorporated by reference). Other analog nucleic acids include those with positive backbones (Denpcy et al., Proc. Natl. Acad. Sci. USA 92:6097 (1995); non-ionic backbones (U.S. Pat. Nos. 5,386,023, 5,637,684, 5,602,240, 5,216,141 and 4,469,863; Kiedrowshi et al., Angew. Chem. Intl. Ed. English 30:423 (1991); Letsinger et al., J. Am. Chem. Soc. 110:4470 (1988); Letsinger et al., Nucleoside & Nucleotide 13:1597 (1994); Chapters 2 and 3, ASC Symposium Series 580, “Carbohydrate Modifications in Antisense Research”, Ed. Y. S. Sanghui and P. Dan Cook; Mesmaeker et al., Bioorganic & Medicinal Chem. Lett. 4:395 (1994); Jeffs et al., J. Biomolecular NMR 34:17 (1994); Tetrahedron Lett. 37:743 (1996)) and non-ribose backbones, including those described in U.S. Pat. Nos. 5,235,033 and 5,034,506, and Chapters 6 and 7, ASC Symposium Series 580, “Carbohydrate Modifications in Antisense Research”, Ed. Y. S. Sanghui and P. Dan Cook. Nucleic acids containing one or more carbocyclic sugars are also included within one definition of nucleic acids (see Jenkins et al., Chem. Soc. Rev. (1995) pp169-176). Several nucleic acid analogs are described in Rawls, C & E News Jun. 2, 1997 page 35. All of these references are hereby expressly incorporated by reference. These modifications of the ribose-phosphate backbone may be done for a variety of reasons, for example to increase the stability and half-life of such molecules in physiological environments for use in anti-sense applications or as probes on a biochip.

[0053] As will be appreciated by those in the art, all of these nucleic acid analogs may find use in the present invention. In addition, mixtures of naturally occurring nucleic acids and analogs can be made; alternatively, mixtures of different nucleic acid analogs, and mixtures of naturally occurring nucleic acids and analogs may be made.

[0054] The nucleic acids may be single stranded or double stranded, as specified, or contain portions of both double stranded or single stranded sequence. As will be appreciated by those in the art, the depiction of a single strand “Watson” also defines the sequence of the other strand “Crick”; thus the sequences described herein also includes the complement of the sequence. The nucleic acid may be DNA, both genomic and cDNA, RNA, or a hybrid, where the nucleic acid contains any combination of deoxyribo- and ribo-nucleotides, and any combination of bases, including uracil, adenine, thymine, cytosine, guanine, inosine, xanthine, hypoxanthine, isocytosine, isoguanine, etc. As used herein, the term “nucleoside” includes nucleotides and nucleoside and nucleotide analogs, and modified nucleosides such as amino modified nucleosides. In addition, “nucleoside” includes non-naturally occurring analog structures. Thus for example the individual units of a peptide nucleic acid, each containing a base, are referred to herein as a nucleoside.

[0055] As used herein, the term “tag,” “sequence tag” or “primer tag sequence” refers to an oligonucleotide with specific nucleic acid sequence that serves to identify a batch of polynucleotides bearing such tags therein. Polynucleotides from the same biological source are covalently tagged with a specific sequence tag so that in subsequent analysis the polynucleotide can be identified according to its source of origin. The sequence tags also serve as primers for nucleic acid amplification reactions.

[0056] A “microarray” is a linear or two-dimensional array of preferably discrete regions, each having a defined area, formed on the surface of a solid support. The density of the discrete regions on a microarray is determined by the total numbers of target polynucleotides to be detected on the surface of a single solid phase support, preferably at least about 50/cm², more preferably at least about 100/cm², even more preferably at least about 500/cm², and still more preferably at least about 1,000/cm². As used herein, a DNA microarray is an array of oligonucleotide primers placed on a chip or other surfaces used to amplify or clone target polynucleotides. Since the position of each particular group of primers in the array is known, the identities of the target polynucleotides can be determined based on their binding to a particular position in the microarray.

[0057] A “linker” is a synthetic oligodeoxyribonucleotide that contains a restriction site. A linker may be blunt end-ligated onto the ends of DNA fragments to create restriction sites that can be used in the subsequent cloning of the fragment into a vector molecule.

[0058] The term “label” refers to a composition capable of producing a detectable signal indicative of the presence of the target polynucleotide in an assay sample. Suitable labels include radioisotopes, nucleotide chromophores, enzymes, substrates, fluorescent molecules, chemiluminescent moieties, magnetic particles, bioluminescent moieties, and the like. As such, a label is any composition detectable by spectroscopic, photochemical, biochemical, immunochemical, electrical, optical, chemical, or any other appropriate means. The term “label” is used to refer to any chemical group or moiety having a detectable physical property or any compound capable of causing a chemical group or moiety to exhibit a detectable physical property, such as an enzyme that catalyzes conversion of a substrate into a detectable product. The term “label” also encompasses compounds that inhibit the expression of a particular physical property. The label may also be a compound that is a member of a binding pair, the other member of which bears a detectable physical property.

[0059] The term “support” refers to conventional supports such as beads, particles, dipsticks, fibers, filters, membranes, and silane or silicate supports such as glass slides.

[0060] The term “amplify” is used in the broad sense to mean creating an amplification product which may include, for example, additional target molecules, or target-like molecules or molecules complementary to the target molecule, which molecules are created by virtue of the presence of the target molecule in the sample. In the situation where the target is a nucleic acid, an amplification product can be made enzymatically with DNA or RNA polymerases or reverse transcriptases.

[0061] As used herein, a “biological sample” refers to a sample of tissue or fluid isolated from an individual, including but not limited to, for example, blood, plasma, serum, spinal fluid, lymph fluid, skin, respiratory, intestinal and genitourinary tracts, tears, saliva, milk, cells (including but not limited to blood cells), tumors, organs, and also samples of in vitro cell culture constituents.

[0062] The term “biological sources” as used herein refers to the sources from which the target polynucleotides are derived. The source can be of any form of “sample” as described above, including but not limited to, cell, tissue or fluid. “Different biological sources” can refer to different cells/tissues/organs of the same individual, or cells/tissues/organs from different individuals of the same species, or cells/tissues/organs from different species.

Cancer-Associated Sequences

[0063] The CA sequences of the invention were initially identified by infection of mice with a retrovirus such as murine leukemia virus (MLV) resulting in lymphoma. Retroviruses have a genome that is made out of RNA. After a retrovirus infects a host cell, a double stranded DNA copy of the retrovirus genome (a “provirus”) is inserted into the genomic DNA of the host cell. The integrated provirus may affect the expression of host genes at or near the site of integration—a phenomenon known as retroviral insertional mutagenesis. Possible changes in the expression of host cell genes include: (i) increased expression of genes near the site of integration resulting from the proximity of elements in the provirus that act as transcriptional promoters and enhancers, (ii) functional inactivation of a gene caused by the integration of a provirus into the gene itself thus preventing the synthesis of a functional gene product, or (iii) expression of a mutated protein that has a different activity to the normal protein. Typically such a protein would be prematurely truncated and lack a regulatory domain near the C terminus. Such a protein might be constitutively active, or act as a dominant negative inhibitor of the normal protein. For example, retrovirus enhancers, including that of SL3-3, are known to act on genes up to approximately 200 kilobases from the insertion site. Moreover, many of these sequences are also involved in other cancers and disease states. Sequences of mouse genes according to this invention, that are identified in this manner are shown as mDxx-yyy in Tables 1-10.

[0064] A CA sequence can be initially identified by substantial nucleic acid and/or amino acid sequence homology to the CA sequences outlined herein. Such homology can be based upon the overall nucleic acid or amino acid sequence, and is generally determined as outlined below, using either homology programs or hybridization conditions.

[0065] In one embodiment, CA sequences are those that are up-regulated in cancers; that is, the expression of these genes is higher in cancer tissue as compared to normal tissue of the same differentiation stage. “Up-regulation” as used herein means increased expression by about 50%, preferably about 100%, more preferably about 150% to about 200%, with up-regulation from 300% to 1000% being preferred.

[0066] In another embodiment, CA sequences are those that are down-regulated in cancers; that is, the expression of these genes is lower in cancer tissue as compared to normal tissue of the same differentiation stage. “Down-regulation” as used herein means decreased expression by about 50%, preferably about 100%, more preferably about 150% to about 200%, with down-regulation from 300% to 1000% to no expression being preferred.

[0067] In yet another embodiment, CA sequences are those that have altered sequences but show either the same or an altered expression profile as compared to normal lymphoid tissue of the same differentiation stage. “Altered CA sequences” as used herein also refers to sequences that are truncated, contain insertions or contain point mutations.

[0068] CA proteins of the present invention may be classified as secreted proteins, transmembrane proteins or intracellular proteins. In a preferred embodiment the CA protein is an intracellular protein. Intracellular proteins may be found in the cytoplasm and/or in the nucleus. Intracellular proteins are involved in all aspects of cellular function and replication (including, for example, signaling pathways); aberrant expression of such proteins results in unregulated or disregulated cellular processes. For example, many intracellular proteins have enzymatic activity such as protein kinase activity, protein phosphatase activity, protease activity, nucleotide cyclase activity, polymerase activity and the like. Intracellular proteins also serve as docking proteins that are involved in organizing complexes of proteins, or targeting proteins to various subcellular localizations, and are involved in maintaining the structural integrity of organelles.

[0069] An increasingly appreciated concept in characterizing intracellular proteins is the presence in the proteins of one or more motifs for which defined functions have been attributed. In addition to the highly conserved sequences found in the enzymatic domain of proteins, highly conserved sequences have been identified in proteins that are involved in protein-protein interaction. For example, Src-homology-2 (SH2) domains bind tyrosine-phosphorylated targets in a sequence dependent manner. PTB domains, which are distinct from SH2 domains, also bind tyrosine phosphorylated targets. SH3 domains bind to proline-rich targets. In addition, PH domains, tetratricopeptide repeats and WD domains to name only a few, have been shown to mediate protein-protein interactions. Some of these may also be involved in binding to phospholipids or other second messengers. As will be appreciated by one of ordinary skill in the art, these motifs can be identified on the basis of primary sequence; thus, an analysis of the sequence of proteins may provide insight into both the enzymatic potential of the molecule and/or molecules with which the protein may associate.

[0070] In a preferred embodiment, the CA sequences are transmembrane proteins. Transmembrane proteins are molecules that span the phospholipid bilayer of a cell. They may have an intracellular domain, an extracellular domain, or both. The intracellular domains of such proteins may have a number of functions including those already described for intracellular proteins. For example, the intracellular domain may have enzymatic activity and/or may serve as a binding site for additional proteins. Frequently the intracellular domain of transmembrane proteins serves both roles. For example certain receptor tyrosine kinases have both protein kinase activity and SH2 domains. In addition, autophosphorylation of tyrosines on the receptor molecule itself creates binding sites for additional SH2 domain containing proteins.

[0071] Transmembrane proteins may contain from one to many transmembrane domains. For example, receptor tyrosine kinases, certain cytokine receptors, receptor guanylyl cyclases and receptor serine/threonine protein kinases contain a single transmembrane domain. However, various other proteins including channels and adenylyl cyclases contain numerous transmembrane domains. Many important cell surface receptors are classified as “seven transmembrane domain” proteins, as they contain 7 membrane spanning regions. Important transmembrane protein receptors include, but are not limited to insulin receptor, insulin-like growth factor receptor, human growth hormone receptor, glucose transporters, transferrin receptor, epidermal growth factor receptor, low density lipoprotein receptor, leptin receptor, interleukin receptors, e.g. IL-1 receptor, IL-2 receptor, etc. CA proteins may be derived from genes that regulate apoptosis (IL-3, GM-CSF and Bcl-x) or are shown to have a role in the regulation of apoptosis.

[0072] Characteristics of transmembrane domains include approximately 20 consecutive hydrophobic amino acids that may be followed by charged amino acids. Therefore, upon analysis of the amino acid sequence of a particular protein, the localization and number of transmembrane domains within the protein may be predicted.

[0073] The extracellilar domains of transmembrane proteins are diverse; however, conserved motifs are found repeatedly among various extracellular domains. Conserved structure and/or functions have been ascribed to different extracellular motifs. For example, cytokine receptors are characterized by a cluster of cysteines and a WSXWS (W=tryptophan, S=serine, X=any amino acid) motif. Immunoglobulin-like domains are highly conserved. Mucin-like domains may be involved in cell adhesion and leucine-rich repeats participate in protein-protein interactions.

[0074] Many extracellular domains are involved in binding to other molecules. In one aspect, extracellular domains are receptors. Factors that bind the receptor domain include circulating ligands, which may be peptides, proteins, or small molecules such as adenosine and the like. For example, growth factors such as EGF, FGF and PDGF are circulating growth factors that bind to their cognate receptors to initiate a variety of cellular responses. Other factors include cytokines, mitogenic factors, neurotrophic factors and the like. Extracellular domains also bind to cell-associated molecules. In this respect, they mediate cell-cell interactions. Cell-associated ligands can be tethered to the cell for example via a glycosylphosphatidylinositol (GPI) anchor, or may themselves be transmembrane proteins. Extracellular domains also associate with the extracellular matrix and contribute to the maintenance of the cell structure.

[0075] CA proteins that are transmembrane are particularly preferred in the present invention as they are good targets for immunotherapeutics, as are described herein. In addition, as outlined below, transmembrane proteins can be also useful in imaging modalities.

[0076] It will also be appreciated by those in the art that a transmembrane protein can be made soluble by removing transmembrane sequences, for example through recombinant methods. Furthermore, transmembrane proteins that have been made soluble can be made to be secreted through recombinant means by adding an appropriate signal sequence.

[0077] In a preferred embodiment, the CA proteins are secreted proteins; the secretion of which can be either constitutive or regulated. These proteins have a signal peptide or signal sequence that targets the molecule to the secretory pathway. Secreted proteins are involved in numerous physiological events; by virtue of their circulating nature, they serve to transmit signals to various other cell types. The secreted protein may function in an autocrine manner (acting on the cell that secreted the factor), a paracrine manner (acting on cells in close proximity to the cell that secreted the factor) or an endocrine manner (acting on cells at a distance). Thus secreted molecules find use in modulating or altering numerous aspects of physiology. CA proteins that are secreted proteins are particularly preferred in the present invention as they serve as good targets for diagnostic markers, for example for blood tests.

CA Sequences and Homologs

[0078] A CA sequence is initially identified by substantial nucleic acid and/or amino acid sequence homology to the CA sequences outlined herein. Such homology can be based upon the overall nucleic acid or amino acid sequence, and is generally determined as outlined below, using either homology programs or hybridization conditions.

[0079] As used herein, a nucleic acid is a “CA nucleic acid” if the overall homology of the nucleic acid sequence to one of the nucleic acids of Tables 1-10 is preferably greater than about 75%, more preferably greater than about 80%, even more preferably greater than about 85% and most preferably greater than 90%. In some embodiments the homology will be as high as about 93 to 95 or 98%. In a preferred embodiment, the sequences that are used to determine sequence identity or similarity are selected from those of the nucleic acids of Tables 1-10. In another embodiment, the sequences are naturally occurring allelic variants of the sequences of the nucleic acids of Tables 1-10. In another embodiment, the sequences are sequence variants as further described herein.

[0080] Homology in this context means sequence similarity or identity, with identity being preferred. A preferred comparison for homology purposes is to compare the sequence containing sequencing errors to the correct sequence. This homology will be determined using standard techniques known in the art, including, but not limited to, the local homology algorithm of Smith & Waterman, Adv. Appl. Math. 2:482 (1981), by the homology alignment algorithm of Needleman & Wunsch, J. Mol. Biol. 48:443 (1970), by the search for similarity method of Pearson & Lipman, PNAS USA 85:2444 (1988), by computerized implementations of these algorithms (GAP, BESTFIT, FASTA, and TFASTA in the Wisconsin Genetics Software Package, Genetics Computer Group, 575 Science Drive, Madison, Wis.), the Best Fit sequence program described by Devereux et al., Nucl. Acid Res. 12:387-395 (1984), preferably using the default settings, or by inspection.

[0081] One example of a useful algorithm is PILEUP. PILEUP creates a multiple sequence alignment from a group of related sequences using progressive, pairwise alignments. It can also plot a tree showing the clustering relationships used to create the alignment. PILEUP uses a simplification of the progressive alignment method of Feng & Doolittle, J. Mol. Evol. 35:351-360 (1987); the method is similar to that described by Higgins & Sharp CABIOS 5:151-153 (1989). Useful PILEUP parameters include a default gap weight of 3.00, a default gap length weight of 0.10, and weighted end gaps.

[0082] Another example of a useful algorithm is the BLAST (Basic Local Alignment Search Tool) algorithm, described in Altschul et al., J. Mol. Biol. 215, 403-410, (1990) and Karlin et al., PNAS USA 90:5873-5787 (1993). A particularly useful BLAST program is the WU-BLAST-2 program which was obtained from Altschul et al., Methods in Enzymology, 266: 460-480 (1996); http://blast.wustl.edu/]. WU-BLAST-2 uses several search parameters, most of which are set to the default values. The adjustable parameters are set with the following values: overlap span=1, overlap fraction=0.125, word threshold (T)=11. The HSP S and HSP S2 parameters are dynamic values and are established by the program itself depending upon the composition of the particular sequence and composition of the particular database against which the sequence of interest is being searched; however, the values may be adjusted to increase sensitivity. A percent amino acid sequence identity value is determined by the number of matching identical residues divided by the total number of residues of the “longer” sequence in the aligned region. The “longer” sequence is the one having the most actual residues in the aligned region (gaps introduced by WU-Blast-2 to maximize the alignment score are ignored).

[0083] Thus, “percent (%) nucleic acid sequence identity” is defined as the percentage of nucleotide residues in a candidate sequence that are identical with the nucleotide residues of the nucleic acids of Tables 1-10. A preferred method utilizes the BLASTN module of WU-BLAST-2 set to the default parameters, with overlap span and overlap fraction set to 1 and 0.125, respectively.

[0084] The alignment may include the introduction of gaps in the sequences to be aligned. In addition, for sequences which contain either more or fewer nucleotides than those of the nucleic acids of Tables 1-10, it is understood that the percentage of homology will be determined based on the number of homologous nucleosides in relation to the total number of nucleosides. Thus homology of sequences shorter than those of the sequences identified herein will be determined using the number of nucleosides in the shorter sequence.

[0085] In another embodiment of the invention, polynucleotide compositions are provided that are capable of hybridizing under moderate to high stringency conditions to a polynucleotide sequence provided herein, or a fragment thereof, or a complementary sequence thereof. Hybridization techniques are well known in the art of molecular biology. For purposes of illustration, suitable moderately stringent conditions for testing the hybridization of a polynucleotide of this invention with other polynucleotides include prewashing in a solution of 5×SSC (“saline sodium citrate”; 9 mM NaCl, 0.9 mM sodium citrate), 0.5% SDS, 1.0 mM EDTA (pH 8.0); hybridizing at 50-60° C., 5×SSC, overnight; followed by washing twice at 65° C. for 20 minutes with each of 2×, 0.5× and 0.2×SSC containing 0.1% SDS. One skilled in the art will understand that the stringency of hybridization can be readily manipulated, such as by altering the salt content of the hybridization solution and/or the temperature at which the hybridization is performed. For example, in another embodiment, suitable highly stringent hybridization conditions include those described above, with the exception that the temperature of hybridization is increased, e.g., to 60-65° C., or 65-70° C. Stringent conditions may also be achieved with the addition of destabilizing agents such as formamide.

[0086] Thus nucleic acids that hybridize under high stringency to the nucleic acids identified in the figures, or their complements, are considered CA sequences. High stringency conditions are known in the art; see for example Maniatis et al., Molecular Cloning: A Laboratory Manual, 2d Edition, 1989, and Short Protocols in Molecular Biology, ed. Ausubel, et al., both of which are hereby incorporated by reference. Stringent conditions are sequence-dependent and will be different in different circumstances. Longer sequences hybridize specifically at higher temperatures. An extensive guide to the hybridization of nucleic acids is found in Tijssen, Techniques in Biochemistry and Molecular Biology—Hybridization with Nucleic Acid Probes, “Overview of principles of hybridization and the strategy of nucleic acid assays” (1993). Generally, stringent conditions are selected to be about 5-10° C. lower than the thermal melting point (Tₘ) for the specific sequence at a defined ionic strength pH. The Tₘ is the temperature (under defined ionic strength, pH and nucleic acid concentration) at which 50% of the probes complementary to the target hybridize to the target sequence at equilibrium (as the target sequences are present in excess, at Tₘ, 50% of the probes are occupied at equilibrium). Stringent conditions will be those in which the salt concentration is less than about 1.0 M sodium ion, typically about 0.01 to 1.0 M sodium ion concentration (or other salts) at pH 7.0 to 8.3 and the temperature is at least about 30° C. for short probes (e.g. 10 to 50 nucleotides) and at least about 60° C. for longer probes (e.g. greater than 50 nucleotides). In another embodiment, less stringent hybridization conditions are used; for example, moderate or low stringency conditions may be used, as are known in the art; see Maniatis and Ausubel, supra, and Tijssen, supra.

[0087] In addition, the CA nucleic acid sequences of the invention are fragments of larger genes, i.e. they are nucleic acid segments. Alternatively, the CA nucleic acid sequences can serve as indicators of oncogene position, for example, the CA sequence may be an enhancer that activates a protooncogene. “Genes” in this context includes coding regions, non-coding regions, and mixtures of coding and non-coding regions. Accordingly, as will be appreciated by those in the art, using the sequences provided herein, additional sequences of the CA genes can be obtained, using techniques well known in the art for cloning either longer sequences or the full-length sequences; see Maniatis et al., and Ausubel, et al., supra, hereby expressly incorporated by reference. In general, this is done using PCR, for example, kinetic PCR.

Detection of CA Expression

[0088] Once the CA nucleic acid is identified, it can be cloned and, if necessary, its constituent parts recombined to form the entire CA nucleic acid. Once isolated from its natural source, e.g., contained within a plasmid or other vector or excised therefrom as a linear nucleic acid segment, the recombinant CA nucleic acid can be further used as a probe to identify and isolate other CA nucleic acids, for example additional coding regions. It can also be used as a “precursor” nucleic acid to make modified or variant CA nucleic acids and proteins. In a preferred embodiment, once a CA gene is identified its nucleotide sequence is used to design probes specific for the CA gene.

[0089] The CA nucleic acids of the present invention are used in several ways. In a first embodiment, nucleic acid probes hybridizable to CA nucleic acids are made and attached to biochips to be used in screening and diagnostic methods, or for gene therapy and/or antisense applications. Alternatively, the CA nucleic acids that include coding regions of CA proteins can be put into expression vectors for the expression of CA proteins, again either for screening purposes or for administration to a patient.

[0090] Recent developments in DNA microarray technology make it possible to conduct a large scale assay of a plurality of target CA nucleic acid molecules on a single solid phase support. U.S. Pat. No. 5,837,832 (Chee et al.) and related patent applications describe immobilizing an array of oligonucleotide probes for hybridization and detection of specific nucleic acid sequences in a sample. Target polynucleotides of interest isolated from a tissue of interest are hybridized to the DNA chip and the specific sequences detected based on the target polynucleotides' preference and degree of hybridization at discrete probe locations. One important use of arrays is in the analysis of differential gene expression, where the profile of expression of genes in different cells, often a cell of interest and a control cell, is compared and any differences in gene expression among the respective cells are identified. Such information is useful for the identification of the types of genes expressed in a particular cell or tissue type and diagnosis of cancer conditions based on the expression profile.

[0091] Typically, RNA from the sample of interest is subjected to reverse transcription to obtain labeled cDNA. See U.S. Pat. No. 6,410,229 (Lockhart et al.) The cDNA is then hybridized to oligonucleotides or cDNAs of known sequence arrayed on a chip or other surface in a known order. The location of the oligonucleotide to which the labeled cDNA hybridizes provides sequence information on the cDNA, while the amount of labeled hybridized RNA or cDNA provides an estimate of the relative representation of the RNA or cDNA of interest. See Schena, et al. Science 270:467-470 (1995). For example, use of a cDNA microarray to analyze gene expression patterns in human cancer is described by DeRisi, et al. (Nature Genetics 14:457-460 (1996)).

[0092] In a preferred embodiment, nucleic acid probes corresponding to CA nucleic acids (both the nucleic acid sequences outlined in the figures and/or the complements thereof) are made. Typically, these probes are synthesized based on the disclosed sequences of this invention. The nucleic acid probes attached to the biochip are designed to be substantially complementary to the CA nucleic acids, i.e. the target sequence (either the target sequence of the sample or to other probe sequences, for example in sandwich assays), such that specific hybridization of the target sequence and the probes of the present invention occurs. As outlined below, this complementarity need not be perfect, in that there may be any number of base pair mismatches that will interfere with hybridization between the target sequence and the single stranded nucleic acids of the present invention. It is expected that the overall homology of the genes at the nucleotide level probably will be about 40% or greater, probably about 60% or greater, and even more probably about 80% or greater; and in addition that there will be corresponding contiguous sequences of about 8-12 nucleotides or longer. However, if the number of mutations is so great that no hybridization can occur under even the least stringent of hybridization conditions, the sequence is not a complementary target sequence. Thus, by “substantially complementary” herein is meant that the probes are sufficiently complementary to the target sequences to hybridize under normal reaction conditions, particularly high stringency conditions, as outlined herein. Whether or not a sequence is unique to a CA gene according to this invention can be determined by techniques known to those of skill in the art. For example, the sequence can be compared to sequences in databanks, e.g., GeneBank, to determine whether it is present in the uninfected host or other organisms. The sequence can also be compared to the known sequences of other viral agents, including those that are known to induce cancer.

[0093] A nucleic acid probe is generally single stranded but can be partly single and partly double stranded. The strandedness of the probe is dictated by the structure, composition, and properties of the target sequence. In general, the oligonucleotide probes range from about 6, 8, 10, 12, 15, 20, 30 to about 100 bases long, with from about 10 to about 80 bases being preferred, and from about 30 to about 50 bases being particularly preferred. That is, generally entire genes are rarely used as probes. In some embodiments, much longer nucleic acids can be used, up to hundreds of bases. The probes are sufficiently specific to hybridize to complementary template sequence under conditions known by those of skill in the art. The number of mismatches between the probes sequences and their complementary template (target) sequences to which they hybridize during hybridization generally do not exceed 15%, usually do not exceed 10% and preferably do not exceed 5%, as determined by FASTA (default settings).

[0094] Oligonucleotide probes can include the naturally-occurring heterocyclic bases normally found in nucleic acids (uracil, cytosine, thymine, adenine and guanine), as well as modified bases and base analogues. Any modified base or base analogue compatible with hybridization of the probe to a target sequence is useful in the practice of the invention. The sugar or glycoside portion of the probe can comprise deoxyribose, ribose, and/or modified forms of these sugars, such as, for example, 2′-O-alkyl ribose. In a preferred embodiment, the sugar moiety is 2′-deoxyribose; however, any sugar moiety that is compatible with the ability of the probe to hybridize to a target sequence can be used.

[0095] In one embodiment, the nucleoside units of the probe are linked by a phosphodiester backbone, as is well known in the art. In additional embodiments, intemucleotide linkages can include any linkage known to one of skill in the art that is compatible with specific hybridization of the probe including, but not limited to phosphorothioate, methylphosphonate, sulfamate (e.g., U.S. Pat. No. 5,470,967) and polyamide (i.e., peptide nucleic acids). Peptide nucleic acids are described in Nielsen et al. (1991) Science 254: 1497-1500, U.S. Pat. No. 5,714,331, and Nielsen (1999) Curr. Opin. Biotechnol. 10:71-75.

[0096] In certain embodiments, the probe can be a chimeric molecule; i.e., can comprise more than one type of base or sugar subunit, and/or the linkages can be of more than one type within the same primer. The probe can comprise a moiety to facilitate hybridization to its target sequence, as are known in the art, for example, intercalators and/or minor groove binders. Variations of the bases, sugars, and intemucleoside backbone, as well as the presence of any pendant group on the probe, will be compatible with the ability of the probe to bind, in a sequence-specific fashion, with its target sequence. A large number of structural modifications, both known and to be developed, are possible within these bounds. Advantageously, the probes according to the present invention may have structural characteristics such that they allow the signal amplification, such structural characteristics being, for example, branched DNA probes as those described by Urdea et al. (Nucleic Acids Symp. Ser., 24:197-200 (1991)) or in the European Patent No. EP-0225,807. Moreover, synthetic methods for preparing the various heterocyclic bases, sugars, nucleosides and nucleotides that form the probe, and preparation of oligonucleotides of specific predetermined sequence, are well-developed and known in the art. A preferred method for oligonucleotide synthesis incorporates the teaching of U.S. Pat. No. 5,419,966.

[0097] Multiple probes may be designed for a particular target nucleic acid to account for polymorphism and/or secondary structure in the target nucleic acid, redundancy of data and the like. In some embodiments, where more than one probe per sequence is used, either overlapping probes or probes to different sections of a single target CA gene are used. That is, two, three, four or more probes, with three being preferred, are used to build in a redundancy for a particular target. The probes can be overlapping (i.e. have some sequence in common), or specific for distinct sequences of a CA gene. When multiple target polynucleotides are to be detected according to the present invention, each probe or probe group corresponding to a particular target polynucleotide is situated in a discrete area of the microarray.

[0098] Probes may be in solution, such as in wells or on the surface of a micro-array, or attached to a solid support. Examples of solid support materials that can be used include a plastic, a ceramic, a metal, a resin, a gel and a membrane. Useful types of solid supports include plates, beads, magnetic material, microbeads, hybridization chips, membranes, crystals, ceramics and self-assembling monolayers. A preferred embodiment comprises a two-dimensional or three-dimensional matrix, such as a gel or hybridization chip with multiple probe binding sites (Pevzner et al., J. Biomol. Struc. & Dyn. 9:399-410, 1991; Maskos and Southern, Nuc. Acids Res. 20:1679-84, 1992). Hybridization chips can be used to construct very large probe arrays that are subsequently hybridized with a target nucleic acid. Analysis of the hybridization pattern of the chip can assist in the identification of the target nucleotide sequence. Patterns can be manually or computer analyzed, but it is clear that positional sequencing by hybridization lends itself to computer analysis and automation. Algorithms and software, which have been developed for sequence reconstruction, are applicable to the methods described herein (R. Drmanac et al., J. Biomol. Struc. & Dyn. 5:1085-1102, 1991; P. A. Pevzner, J. Biomol. Struc. & Dyn. 7:63-73, 1989).

[0099] As will be appreciated by those in the art, nucleic acids can be attached or immobilized to a solid support in a wide variety of ways. By “immobilized” herein is meant the association or binding between the nucleic acid probe and the solid support is sufficient to be stable under the conditions of binding, washing, analysis, and removal as outlined below. The binding can be covalent or non-covalent. By “non-covalent binding” and grammatical equivalents herein is meant one or more of either electrostatic, hydrophilic, and hydrophobic interactions. Included in non-covalent binding is the covalent attachment of a molecule, such as streptavidin, to the support and the non-covalent binding of the biotinylated probe to the streptavidin. By “covalent binding” and grammatical equivalents herein is meant that the two moieties, the solid support and the probe, are attached by at least one bond, including sigma bonds, pi bonds and coordination bonds. Covalent bonds can be formed directly between the probe and the solid support or can be formed by a cross linker or by inclusion of a specific reactive group on either the solid support or the probe or both molecules. Immobilization may also involve a combination of covalent and non-covalent interactions.

[0100] Nucleic acid probes may be attached to the solid support by covalent binding such as by conjugation with a coupling agent or by, covalent or non-covalent binding such as electrostatic interactions, hydrogen bonds or antibody-antigen coupling, or by combinations thereof. Typical coupling agents include biotin/avidin, biotin/streptavidin, Staphylococcus aureus protein A/IgG antibody F_{c} fragment, and streptavidin/protein A chimeras (T. Sano and C. R. Cantor, Bio/Technology 9:1378-81 (1991)), or derivatives or combinations of these agents. Nucleic acids may be attached to the solid support by a photocleavable bond, an electrostatic bond, a disulfide bond, a peptide bond, a diester bond or a combination of these sorts of bonds. The array may also be attached to the solid support by a selectively releasable bond such as 4,4′-dimethoxytrityl or its derivative. Derivatives which have been found to be useful include 3 or 4 [bis-(4-methoxyphenyl)]-methyl-benzoic acid, N-succinimidyl-3 or 4 [bis-(4-methoxyphenyl)]-methyl-benzoic acid, N-succinimidyl-3 or 4 [bis-(4-methoxyphenyl)]-hydroxymethyl-benzoic acid, N-succinimidyl-3 or 4 [bis-(4-methoxyphenyl)]-chloromethyl-benzoic acid, and salts of these acids.

[0101] In general, the probes are attached to the biochip in a wide variety of ways, as will be appreciated by those in the art. As described herein, the nucleic acids can either be synthesized first, with subsequent attachment to the biochip, or can be directly synthesized on the biochip.

[0102] The biochip comprises a suitable solid substrate. By “substrate” or “solid support” or other grammatical equivalents herein is meant any material that can be modified to contain discrete individual sites appropriate for the attachment or association of the nucleic acid probes and is amenable to at least one detection method. The solid phase support of the present invention can be of any solid materials and structures suitable for supporting nucleotide hybridization and synthesis. Preferably, the solid phase support comprises at least one substantially rigid surface on which the primers can be immobilized and the reverse transcriptase reaction performed. The substrates with which the polynucleotide microarray elements are stably associated may be fabricated from a variety of materials, including plastics, ceramics, metals, acrylamide, cellulose, nitrocellulose, glass, polystyrene, polyethylene vinyl acetate, polypropylene, polymethacrylate, polyethylene, polyethylene oxide, polysilicates, polycarbonates, Teflon®, fluorocarbons, nylon, silicon rubber, polyanhydrides, polyglycolic acid, polylactic acid, polyorthoesters, polypropylfumerate, collagen, glycosaminoglycans, and polyamino acids. Substrates may be two-dimensional or three-dimensional in form, such as gels, membranes, thin films, glasses, plates, cylinders, beads, magnetic beads, optical fibers, woven fibers, etc. A preferred form of array is a three-dimensional array. A preferred three-dimensional array is a collection of tagged beads. Each tagged bead has different primers attached to it. Tags are detectable by signaling means such as color (Luminex, Illumina) and electromagnetic field (Pharmaseq) and signals on tagged beads can even be remotely detected (e.g., using optical fibers). The size of the solid support can be any of the standard microarray sizes, useful for DNA microarray technology, and the size may be tailored to fit the particular machine being used to conduct a reaction of the invention. In general, the substrates allow optical detection and do not appreciably fluoresce.

[0103] In a preferred embodiment, the surface of the biochip and the probe may be derivatized with chemical functional groups for subsequent attachment of the two. Thus, for example, the biochip is derivatized with a chemical functional group including, but not limited to, amino groups, carboxy groups, oxo groups and thiol groups, with amino groups being particularly preferred. Using these functional groups, the probes can be attached using functional groups on the probes. For example, nucleic acids containing amino groups can be attached to surfaces comprising amino groups, for example using linkers as are known in the art; for example, homo-or hetero-bifunctional linkers as are well known (see 1994 Pierce Chemical Company catalog, technical section on cross-linkers, pages 155-200, incorporated herein by reference). In addition, in some cases, additional linkers, such as alkyl groups (including substituted and heteroalkyl groups) may be used.

[0104] In this embodiment, the oligonucleotides are synthesized as is known in the art, and then attached to the surface of the solid support. As will be appreciated by those skilled in the art, either the 5′ or 3′ terminus may be attached to the solid support, or attachment may be via an internal nucleoside. In an additional embodiment, the immobilization to the solid support may be very strong, yet non-covalent. For example, biotinylated oligonucleotides can be made, which bind to surfaces covalently coated with streptavidin, resulting in attachment.

[0105] The arrays may be produced according to any convenient methodology, such as preforming the polynucleotide microarray elements and then stably associating them with the surface. Alternatively, the oligonucleotides may be synthesized on the surface, as is known in the art. A number of different array configurations and methods for their production are known to those of skill in the art and disclosed in WO 95/25116 and WO 95/35505 (photolithographic techniques), U.S. Pat. No. 5,445,934 (in situ synthesis by photolithography), U.S. Pat. No. 5,384,261 (in situ synthesis by mechanically directed flow paths); and U.S. Pat. No. 5,700,637 (synthesis by spotting, printing or coupling); the disclosure of which are herein incorporated in their entirety by reference. Another method for coupling DNA to beads uses specific ligands attached to the end of the DNA to link to ligand-binding molecules attached to a bead. Possible ligand-binding partner pairs include biotin-avidin/streptavidin, or various antibody/antigen pairs such as digoxygenin-antidigoxygenin antibody (Smith et al., “Direct Mechanical Measurements of the Elasticity of Single DNA Molecules by Using Magnetic Beads,” Science 258:1122-1126 (1992)). Covalent chemical attachment of DNA to the support can be accomplished by using standard coupling agents to link the 5′-phosphate on the DNA to coated microspheres through a phosphoamidate bond. Methods for immobilization of oligonucleotides to solid-state substrates are well established. See Pease et al., Proc. Natl. Acad. Sci. USA 91(11):5022-5026 (1994). A preferred method of attaching oligonucleotides to solid-state substrates is described by Guo et al., Nucleic Acids Res. 22:5456-5465 (1994). Immobilization can be accomplished either by in situ DNA synthesis (Maskos and Southern, Nucleic Acids Research, 20:1679-1684 (1992) or by covalent attachment of chemically synthesized oligonucleotides (Guo et al., supra) in combination with robotic arraying technologies.

[0106] In addition to the solid-phase technology represented by biochip arrays, gene expression can also be quantified using liquid-phase arrays. One such system is kinetic polymerase chain reaction (PCR). Kinetic PCR allows for the simultaneous amplification and quantification of specific nucleic acid sequences. The specificity is derived from synthetic oligonucleotide primers designed to preferentially adhere to single-stranded nucleic acid sequences bracketing the target site. This pair of oligonucleotide primers form specific, non-covalently bound complexes on each strand of the target sequence. These complexes facilitate in vitro transcription of double-stranded DNA in opposite orientations. Temperature cycling of the reaction mixture creates a continuous cycle of primer binding, transcription, and re-melting of the nucleic acid to individual strands. The result is an exponential increase of the target dsDNA product. This product can be quantified in real time either through the use of an intercalating dye or a sequence specific probe. SYBR® Greene I, is an example of an intercalating dye, that preferentially binds to dsDNA resulting in a concomitant increase in the fluorescent signal. Sequence specific probes, such as used with TaqMan® technology, consist of a fluorochrome and a quenching molecule covalently bound to opposite ends of an oligonucleotide. The probe is designed to selectively bind the target DNA sequence between the two primers. When the DNA strands are synthesized during the PCR reaction, the fluorochrome is cleaved from the probe by the exonuclease activity of the polymerase resulting in signal dequenching. The probe signaling method can be more specific than the intercalating dye method, but in each case, signal strength is proportional to the dsDNA product produced. Each type of quantification method can be used in multi-well liquid phase arrays with each well representing primers and/or probes specific to nucleic acid sequences of interest. When used with messenger RNA preparations of tissues or cell lines, an array of probe/primer reactions can simultaneously quantify the expression of multiple gene products of interest. See Germer, S., et al., Genome Res. 10:258-266 (2000); Heid, C. A., et al., Genome Res. 6, 986-994 (1996).

Expression of CA Proteins

[0107] In a preferred embodiment, CA nucleic acids encoding CA proteins are used to make a variety of expression vectors to express CA proteins which can then be used in screening assays, as described below. The expression vectors may be either self-replicating extrachromosomal vectors or vectors which integrate into a host genome. Generally, these expression vectors include transcriptional and translational regulatory nucleic acid operably linked to the nucleic acid encoding the CA protein. The term “control sequences” refers to DNA sequences necessary for the expression of an operably linked coding sequence in a particular host organism. The control sequences that are suitable for prokaryotes, for example, include a promoter, optionally an operator sequence, and a ribosome binding site. Eukaryotic cells are known to utilize promoters, polyadenylation signals, and enhancers.

[0108] Nucleic acid is “operably linked” when it is placed into a functional relationship with another nucleic acid sequence. For example, DNA for a presequence or secretory leader is operably linked to DNA for a polypeptide if it is expressed as a preprotein that participates in the secretion of the polypeptide; a promoter or enhancer is operably linked to a coding sequence if it affects the transcription of the sequence; or a ribosome binding site is operably linked to a coding sequence if it is positioned so as to facilitate translation. Generally, “operably linked” means that the DNA sequences being linked are contiguous, and, in the case of a secretory leader, contiguous and in reading phase. However, enhancers do not have to be contiguous. Linking is accomplished by ligation at convenient restriction sites. If such sites do not exist, synthetic oligonucleotide adaptors or linkers are used in accordance with conventional practice. The transcriptional and translational regulatory nucleic acid will generally be appropriate to the host cell used to express the CA protein; for example, transcriptional and translational regulatory nucleic acid sequences from Bacillus are preferably used to express the CA protein in Bacillus. Numerous types of appropriate expression vectors, and suitable regulatory sequences are known in the art for a variety of host cells.

[0109] In general, the transcriptional and translational regulatory sequences may include, but are not limited to, promoter sequences, ribosomal binding sites, transcriptional start and stop sequences, translational start and stop sequences, and enhancer or activator sequences. In a preferred embodiment, the regulatory sequences include a promoter and transcriptional start and stop sequences.

[0110] Promoter sequences encode either constitutive or inducible promoters. The promoters may be either naturally occurring promoters or hybrid promoters. Hybrid promoters, which combine elements of more than one promoter, are also known in the art, and are useful in the present invention.

[0111] In addition, the expression vector may comprise additional elements. For example, the expression vector may have two replication systems, thus allowing it to be maintained in two organisms, for example in mammalian or insect cells for expression and in a prokaryotic host for cloning and amplification. Furthermore, for integrating expression vectors, the expression vector contains at least one sequence homologous to the host cell genome, and preferably two homologous sequences that flank the expression construct. The integrating vector may be directed to a specific locus in the host cell by selecting the appropriate homologous sequence for inclusion in the vector. Constructs for integrating vectors are well known in the art.

[0112] In addition, in a preferred embodiment, the expression vector contains a selectable marker gene to allow the selection of transformed host cells. Selection genes are well known in the art and will vary with the host cell used.

[0113] The CA proteins of the present invention are produced by culturing a host cell transformed with an expression vector containing nucleic acid encoding a CA protein, under the appropriate conditions to induce or cause expression of the CA protein. The conditions appropriate for CA protein expression will vary with the choice of the expression vector and the host cell, and will be easily ascertained by one skilled in the art through routine experimentation. For example, the use of constitutive promoters in the expression vector will require optimizing the growth and proliferation of the host cell, while the use of an inducible promoter requires the appropriate growth conditions for induction. In addition, in some embodiments, the timing of the harvest is important. For example, the baculoviral systems used in insect cell expression are lytic viruses, and thus harvest time selection can be crucial for product yield.

[0114] Appropriate host cells include yeast, bacteria, archaebacteria, fungi, and insect, plant and animal cells, including mammalian cells. Of particular interest are Drosophila melanogaster cells, Saccharomyces cerevisiae and other yeasts, E. coli, Bacillus subtilis, Sf9 cells, C129 cells, 293 cells, Neurospora, BHK, CHO, COS, HeLa cells, THP1 cell line (a macrophage cell line) and human cells and cell lines.

[0115] In a preferred embodiment, the CA proteins are expressed in mammalian cells. Mammalian expression systems are also known in the art, and include retroviral systems. A preferred expression vector system is a retroviral vector system such as is generally described in PCT/US97/01019 and PCT/US97/01048, both of which are hereby expressly incorporated by reference. Of particular use as mammalian promoters are the promoters from mammalian viral genes, since the viral genes are often highly expressed and have a broad host range. Examples include the SV40 early promoter, mouse mammary tumor virus LTR promoter, adenovirus major late promoter, herpes simplex virus promoter, and the CMV promoter. Typically, transcription termination and polyadenylation sequences recognized by mammalian cells are regulatory regions located 3′ to the translation stop codon and thus, together with the promoter elements, flank the coding sequence. Examples of transcription terminator and polyadenylation signals include those derived form SV40.

[0116] The methods of introducing exogenous nucleic acid into mammalian hosts, as well as other hosts, are well known in the art, and will vary with the host cell used. Techniques include dextran-mediated transfection, calcium phosphate precipitation, polybrene mediated transfection, protoplast fusion, electroporation, viral infection, encapsulation of the polynucleotide(s) in liposomes, and direct microinjection of the DNA into nuclei.

[0117] In a preferred embodiment, CA proteins are expressed in bacterial systems. Bacterial expression systems are well known in the art. Promoters from bacteriophage may also be used and are known in the art. In addition, synthetic promoters and hybrid promoters are also useful; for example, the tac promoter is a hybrid of the trp and lac promoter sequences. Furthermore, a bacterial promoter can include naturally occurring promoters of non-bacterial origin that have the ability to bind bacterial RNA polymerase and initiate transcription. In addition to a functioning promoter sequence, an efficient ribosome binding site is desirable. The expression vector may also include a signal peptide sequence that provides for secretion of the CA protein in bacteria. The protein is either secreted into the growth media (gram-positive bacteria) or into the periplasmic space, located between the inner and outer membrane of the cell (gram-negative bacteria). The bacterial expression vector may also include a selectable marker gene to allow for the selection of bacterial strains that have been transformed. Suitable selection genes include genes that render the bacteria resistant to drugs such as ampicillin, chloramphenicol, erythromycin, kanamycin, neomycin and tetracycline. Selectable markers also include biosynthetic genes, such as those in the histidine, tryptophan and leucine biosynthetic pathways. These components are assembled into expression vectors. Expression vectors for bacteria are well known in the art, and include vectors for Bacillus subtilis, E. coli, Streptococcus cremoris, and Streptococcus lividans, among others. The bacterial expression vectors are transformed into bacterial host cells using techniques well known in the art, such as calcium chloride treatment, electroporation, and others.

[0118] In one embodiment, CA proteins are produced in insect cells. Expression vectors for the transformation of insect cells, and in particular, baculovirus-based expression vectors, are well known in the art.

[0119] In a preferred embodiment, CA protein is produced in yeast cells. Yeast expression systems are well known in the art, and include expression vectors for Saccharomyces cerevisiae, Candida albicans and C. maltosa, Hansenula polymorpha, Kluyveromyces fragilis and K. lactis, Pichia guillerimondii and P. pastoris, Schizosaccharomyces pombe, and Yarrowia lipolytica.

[0120] The CA protein may also be made as a fusion protein, using techniques well known in the art. Thus, for example, for the creation of monoclonal antibodies. If the desired epitope is small, the CA protein may be fused to a carrier protein to form an immunogen. Alternatively, the CA protein may be made as a fusion protein to increase expression, or for other reasons. For example, when the CA protein is a CA peptide, the nucleic acid encoding the peptide may be linked to other nucleic acid for expression purposes.

[0121] In one embodiment, the CA nucleic acids, proteins and antibodies of the invention are labeled. By “labeled” herein is meant that a compound has at least one element, isotope or chemical compound attached to enable the detection of the compound. In general, labels fall into three classes: a) isotopic labels, which may be radioactive or heavy isotopes; b) immune labels, which may be antibodies or antigens; and c) colored or fluorescent dyes. The labels may be incorporated into the CA nucleic acids, proteins and antibodies at any position. For example, the label should be capable of producing, either directly or indirectly, a detectable signal. The detectable moiety may be a radioisotope, such as ³H, ¹⁴C, ³²p, ³⁵S, or ¹²⁵I, a fluorescent or chemiluminescent compound, such as fluorescein isothiocyanate, rhodamine, or luciferin, or an enzyme, such as alkaline phosphatase, beta-galactosidase or horseradish peroxidase. Any method known in the art for conjugating the antibody to the label may be employed, including those methods described by Hunter et al., Nature, 144:945 (1962); David et al., Biochemistry, 13:1014 (1974); Pain et al., J. Immunol. Meth., 40:219 (1981); and Nygren, J. Histochem. and Cytochem., 30:407 (1982).

[0122] Accordingly, the present invention also provides CA protein sequences. A CA protein of the present invention may be identified in several ways. “Protein” in this sense includes proteins, polypeptides, and peptides. As will be appreciated by those in the art, the nucleic acid sequences of the invention can be used to generate protein sequences. There are a variety of ways to do this, including cloning the entire gene and verifying its frame and amino acid sequence, or by comparing it to known sequences to search for homology to provide a frame, assuming the CA protein has homology to some protein in the database being used. Generally, the nucleic acid sequences are input into a program that will search all three frames for homology. This is done in a preferred embodiment using the following NCBI Advanced BLAST parameters. The program is blastx or blastn. The database is nr. The input data is as “Sequence in FASTA format”. The organism list is “none”. The “expect” is 10; the filter is default. The “descriptions” is 500, the “alignments” is 500, and the “alignment view” is pairwise. The “query Genetic Codes” is standard (1). The matrix is BLOSUM 62; gap existence cost is 11, per residue gap cost is 1; and the lambda ratio is 0.85 default. This results in the generation of a putative protein sequence.

[0123] In general, the term “polypeptide” as used herein refers to both the full-length polypeptide encoded by the recited polynucleotide, the polypeptide encoded by the gene represented by the recited polynucleotide, as well as portions or fragments thereof. The present invention encompasses variants of the naturally occurring proteins, wherein such variants are homologous or substantially similar to the naturally occurring protein, and can be of an origin of the same or different species as the naturally occurring protein (e.g., human, murine, or some other species that naturally expresses the recited polypeptide, usually a mammalian species). In general, variant polypeptides have a sequence that has at least about 80%, at least about 81%, at least about 82%, at least about 83%, at least about 84%, at least about 85%, at least about 86%, at least about 87%, at least about 88%, at least about 89%, usually at least about 90%, at least 91%, at least 92%, at least 93%, at least 94%, at least 95%, at least 96%, at least 97%, at least 98% and more usually at least about 99% sequence identity with a differentially expressed polypeptide described herein, as determined by the Smith-Waterman homology search algorithm using an affine gap search with a gap open penalty of 12 and a gap extension penalty of 2, BLOSUM matrix of 62. The Smith-Waterman homology search algorithm is taught in Smith and Waterman, Adv. Appl. Math. (1981) 2: 482-489. The variant polypeptides can be naturally or non-naturally glycosylated, i.e., the polypeptide has a glycosylation pattern that differs from the glycosylation pattern found in the corresponding naturally occurring protein.

[0124] Also within the scope of the invention are variants. Variants of polypeptides include mutants, fragments, and fusions. Mutants can include amino acid substitutions, additions or deletions. The amino acid substitutions can be conservative amino acid substitutions or substitutions to eliminate non-essential amino acids, such as to alter a glycosylation site, a phosphorylation site or an acetylation site, or to minimize misfolding by substitution or deletion of one or more cysteine residues that are not necessary for function. Conservative amino acid substitutions are those that preserve the general charge, hydrophobicity/hydrophilicity, and/or steric bulk of the amino acid substituted. Variants can be designed so as to retain or have enhanced biological activity of a particular region of the protein (e.g., a functional domain and/or, where the polypeptide is a member of a protein family, a region associated with a consensus sequence). Selection of amino acid alterations for production of variants can be based upon the accessibility (interior vs. exterior) of the amino acid (see, e.g., Go et al, Int. J. Peptide Protein Res. (1980) 15:211), the thermostability of the variant polypeptide (see, e.g., Querol et al., Prot. Eng. (1996) 9:265), desired glycosylation sites (see, e.g., Olsen and Thomsen, J. Gen. Microbiol. (1991) 137:579), desired disulfide bridges (see, e.g., Clarke et al., Biochemistry (1993) 32:4322; and Wakarchuk et al., Protein Eng. (1994) 7:1379), desired metal binding sites (see, e.g., Toma et al., Biochemistry (1991) 30:97, and Haezerbrouck et al., Protein Eng. (1993) 6:643), and desired substitutions within proline loops (see, e.g., Masul et al., Appl. Env. Microbiol. (1994) 60:3579). Cysteine-depleted muteins can be produced as disclosed in U.S. Pat. No. 4,959,314.

[0125] Variants also include fragments of the polypeptides disclosed herein, particularly biologically active fragments and/or fragments corresponding to functional domains. Fragments of interest will typically be at least about 8 amino acids (aa) 10 aa, 15 aa, 20 aa, 25 aa, 30 aa, 35 aa, 40 aa, to at least about 45 aa in length, usually at least about 50 aa in length, at least about 75 aa, at least about 100 aa, at least about 125 aa, at least about 150 aa in length, at least about 200 aa, at least about 300 aa, at least about 400 aa and can be as long as 500 aa in length or longer, but will usually not exceed about 1000 aa in length, where the fragment will have a stretch of amino acids that is identical to a polypeptide encoded by a polynucleotide having a sequence of any one of the polynucleotide sequences provided herein, or a homolog thereof. The protein variants described herein are encoded by polynucleotides that are within the scope of the invention. The genetic code can be used to select the appropriate codons to construct the corresponding variants.

[0126] While altered expression of the polynucleotides associated with cancer is observed, altered levels of expression of the polypeptides encoded by these polynucleotides may likely play a role in cancers.

[0127] Also included within one embodiment of CA proteins are amino acid variants of the naturally occurring sequences, as determined herein. Preferably, the variants are preferably greater than about 75% homologous to the wild-type sequence, more preferably greater than about 80%, even more preferably greater than about 85% and most preferably greater than 90%. The present application is also directed to proteins containing polypeptides at least 80%, 85%, 90%, 95%, 96%, 97%, 98% or 99% identical to a CA polypeptide sequence set forth herein. As for nucleic acids, homology in this context means sequence similarity or identity, with identity being preferred. This homology will be determined using standard techniques known in the art as are outlined above for the nucleic acid homologies.

[0128] CA proteins of the present invention may be shorter or longer than the wild type amino acid sequences. Thus, in a preferred embodiment, included within the definition of CA proteins are portions or fragments of the wild type sequences herein. In addition, as outlined above, the CA nucleic acids of the invention may be used to obtain additional coding regions, and thus additional protein sequence, using techniques known in the art.

[0129] In a preferred embodiment, the CA proteins are derivative or variant CA proteins as compared to the wild-type sequence. That is, as outlined more fully below, the derivative CA peptide will contain at least one amino acid substitution, deletion or insertion, with amino acid substitutions being particularly preferred. The amino acid substitution, insertion or deletion may occur at any residue within the CA peptide.

[0130] Also included in an embodiment of CA proteins of the present invention are amino acid sequence variants. These variants fall into one or more of three classes: substitutional, insertional or deletional variants. These variants ordinarily are prepared by site-specific mutagenesis of nucleotides in the DNA encoding the CA protein, using cassette or PCR mutagenesis or other techniques well known in the art, to produce DNA encoding the variant, and thereafter expressing the DNA in recombinant cell culture as outlined above. However, variant CA protein fragments having up to about 100-150 residues may be prepared by in vitro synthesis using established techniques. Amino acid sequence variants are characterized by the predetermined nature of the variation, a feature that sets them apart from naturally occurring allelic or interspecies variation of the CA protein amino acid sequence. The variants typically exhibit the same qualitative biological activity as the naturally occurring analogue, although variants can also be selected which have modified characteristics as will be more fully outlined below.

[0131] While the site or region for introducing an amino acid sequence variation is predetermined, the mutation per se need not be predetermined. For example, in order to optimize the performance of a mutation at a given site, random mutagenesis may be conducted at the target codon or region and the expressed CA variants screened for the optimal combination of desired activity. Techniques for making substitution mutations at predetermined sites in DNA having a known sequence are well known, for example, M13 primer mutagenesis and LAR mutagenesis. Screening of the mutants is done using assays of CA protein activities.

[0132] Amino acid substitutions are typically of single residues; insertions usually will be on the order of from about 1 to 20 amino acids, although considerably larger insertions may be tolerated. Deletions range from about 1 to about 20 residues, although in some cases deletions may be much larger.

[0133] Substitutions, deletions, insertions or any combination thereof may be used to arrive at a final derivative. Generally these changes are done on a few amino acids to minimize the alteration of the molecule. However, larger changes may be tolerated in certain circumstances. When small alterations in the characteristics of the CA protein are desired, substitutions are generally made in accordance with the following chart:

CHART 1

| Original | Exemplary |
|---|---|
| Residue | Substitutions |
| Ala | Ser |
| Arg | Lys |
| Asn | Gln, His |
| Asp | Glu |
| Cys | Ser |
| Gln | Asn |
| Glu | Asp |
| Gly | Pro |
| His | Asn, Gln |
| Ile | Leu, Val |
| Leu | Ile, Val |
| Lys | Arg, Gln, Glu |
| Met | Leu, Ile |
| Phe | Met, Leu, Tyr |
| Ser | Thr |
| Thr | Ser |
| Trp | Tyr |
| Tyr | Trp, Phe |
| Val | Ile, Leu |

[0134] Substantial changes in function or immunological identity are made by selecting substitutions that are less conservative than those shown in Chart I. For example, substitutions may be made full length to more significantly affect one or more of the following: the structure of the polypeptide backbone in the area of the alteration (e.g., the alpha-helical or beta-sheet structure); the charge or hydrophobicity of the molecule at the target site; and the bulk of the side chain. The substitutions which in general are expected to produce the greatest changes in the polypeptide's properties are those in which (a) a hydrophilic residue, e.g. seryl or threonyl is substituted for (or by) a hydrophobic residue, e.g. leucyl, isoleucyl, phenylalanyl, valyl or alanyl; (b) a cysteine or proline is substituted for (or by) any other residue; (c) a residue having an electropositive side chain, e.g. lysyl, arginyl, or histidyl, is substituted for (or by) an electronegative residue, e.g. glutamyl or aspartyl; or (d) a residue having a bulky side chain, e.g. phenylalanine, is substituted for (or by) one not having a side chain, e.g. glycine.

[0135] The variants typically exhibit the same qualitative biological activity and will elicit the same immune response as the naturally-occurring analogue, although variants also are selected to modify the characteristics of the CA proteins as needed. Alternatively, the variant may be designed such that the biological activity of the CA protein is altered. For example, glycosylation sites may be altered or removed, dominant negative mutations created, etc.

[0136] Covalent modifications of CA polypeptides are included within the scope of this invention, for example for use in screening. One type of covalent modification includes reacting targeted amino acid residues of a CA polypeptide with an organic derivatizing agent that is capable of reacting with selected side chains or the N- or C-terminal residues of a CA polypeptide. Derivatization with bifunctional agents is useful, for instance, for crosslinking CA polypeptides to a water-insoluble support matrix or surface for use in the method for purifying anti-CA antibodies or screening assays, as is more fully described below. Commonly used crosslinking agents include, e.g., 1,1-bis(diazoacetyl)-2-phenylethane, glutaraldehyde, N-hydroxysuccinimide esters, for example, esters with 4-azidosalicylic acid, homobifunctional imidoesters, including disuccinimidyl esters such as 3,3′-dithiobis(succinimidylpropionate), bifunctional maleimides such as bis-N-maleimido-1,8-octane and agents such as methyl-3-[(p-azidophenyl)dithio]propioimidate.

[0137] Other modifications include deamidation of glutaminyl and asparaginyl residues to the corresponding glutamyl and aspartyl residues, respectively, hydroxylation of proline and lysine, phosphorylation of hydroxyl groups of seryl, threonyl or tyrosyl residues, methylation of the a-amino groups of lysine, arginine, and histidine side chains [T. E. Creighton, Proteins: Structure and Molecular Properties, W. H. Freeman & Co., San Francisco, pp. 79-86 (1983)], acetylation of the N-terminal amine, and amidation of any C-terminal carboxyl group.

[0138] Another type of covalent modification of the CA polypeptide included within the scope of this invention comprises altering the native glycosylation pattern of the polypeptide. “Altering the native glycosylation pattern” is intended for purposes herein to mean deleting one or more carbohydrate moieties found in native sequence CA polypeptide, and/or adding one or more glycosylation sites that are not present in the native sequence CA polypeptide.

[0139] Addition of glycosylation sites to CA polypeptides may be accomplished by altering the amino acid sequence thereof. The alteration may be made, for example, by the addition of, or substitution by, one or more serine or threonine residues to the native sequence CA polypeptide (for O-linked glycosylation sites). The CA amino acid sequence may optionally be altered through changes at the DNA level, particularly by mutating the DNA encoding the CA polypeptide at preselected bases such that codons are generated that will translate into the desired amino acids.

[0140] Another means of increasing the number of carbohydrate moieties on the CA polypeptide is by chemical or enzymatic coupling of glycosides to the polypeptide. Such methods are described in the art, e.g., in WO 87/05330 published 11 Sep. 1987, and in Aplin and Wriston, LA Crit. Rev. Biochem., pp. 259-306 (1981).

[0141] Removal of carbohydrate moieties present on the CA polypeptide may be accomplished chemically or enzymatically or by mutational substitution of codons encoding for amino acid residues that serve as targets for glycosylation. Chemical deglycosylation techniques are known in the art and described, for instance, by Hakimuddin, et al., Arch. Biochem. Biophys., 259:52 (1987) and by Edge et al., Anal. Biochem., 118:131 (1981). Enzymatic cleavage of carbohydrate moieties on polypeptides can be achieved by the use of a variety of endo- and exo-glycosidases as described by Thotakura et al., Meth. Enzymol., 138:350 (1987).

[0142] Another type of covalent modification of CA comprises linking the CA polypeptide to one of a variety of nonproteinaceous polymers, e.g., polyethylene glycol, polypropylene glycol, or polyoxyalkylenes, in the manner set forth in U.S. Pat. Nos. 4,640,835; 4,496,689; 4,301,144; 4,670,417; 4,791,192 or 4,179,337.

[0143] CA polypeptides of the present invention may also be modified in a way to form chimeric molecules comprising a CA polypeptide fused to another, heterologous polypeptide or amino acid sequence. In one embodiment, such a chimeric molecule comprises a fusion of a CA polypeptide with a tag polypeptide that provides an epitope to which an anti-tag antibody can selectively bind. The epitope tag is generally placed at the amino-or carboxyl-terminus of the CA polypeptide, although internal fusions may also be tolerated in some instances. The presence of such epitope-tagged forms of a CA polypeptide can be detected using an antibody against the tag polypeptide. Also, provision of the epitope tag enables the CA polypeptide to be readily purified by affinity purification using an anti-tag antibody or another type of affinity matrix that binds to the epitope tag. In an alternative embodiment, the chimeric molecule may comprise a fusion of a CA polypeptide with an immunoglobulin or a particular region of an immunoglobulin. For a bivalent form of the chimeric molecule, such a fusion could be to the Fc region of an IgG molecule.

[0144] Various tag polypeptides and their respective antibodies are well known in the art. Examples include poly-histidine (poly-his) or poly-histidine-glycine (poly-his-gly) tags; the flu HA tag polypeptide and its antibody 12CA5 [Field et al., Mol. Cell. Biol., 8:2159-2165 (1988)]; the c-myc tag and the 8F9, 3C7, 6E10, G4, B7 and 9E10 antibodies thereto [Evan et al., Molecular and Cellular Biology, 5:3610-3616 (1985)]; and the Herpes Simplex virus glycoprotein D (gD) tag and its antibody [Paborsky et al., Protein Engineering, 3(6):547-553 (1990)]. Other tag polypeptides include the Flag-peptide [Hopp et al., BioTechnology, 6:1204-1210 (1988)]; the KT3 epitope peptide [Martin et al., Science, 255:192-194 (1992)]; tubulin epitope peptide [Skinner et al., J. Biol. Chem., 266:15163-15166 (1991)]; and the T7 gene 10 protein peptide tag [Lutz-Freyermuth et al., Proc. Natl. Acad. Sci. USA, 87:6393-6397 (1990)].

[0145] Also included with the definition of CA protein in one embodiment are other CA proteins of the CA family, and CA proteins from other organisms, which are cloned and expressed as outlined below. Thus, probe or degenerate polymerase chain reaction (PCR) primer sequences may be used to find other related CA proteins from humans or other organisms. As will be appreciated by those in the art, particularly useful probe and/or PCR primer sequences include the unique areas of the CA nucleic acid sequence. As is generally known in the art, preferred PCR primers are from about 15 to about 35 nucleotides in length, with from about 20 to about 30 being preferred, and may contain inosine as needed. The conditions for the PCR reaction are well known in the art.

[0146] In addition, as is outlined herein, CA proteins can be made that are longer than those encoded by the nucleic acids of the figures, for example, by the elucidation of additional sequences, the addition of epitope or purification tags, the addition of other fusion sequences, etc.

[0147] CA proteins may also be identified as being encoded by CA nucleic acids. Thus, CA proteins are encoded by nucleic acids that will hybridize to the sequences of the sequence listings, or their complements, as outlined herein.

CA Antigens and Antibodies Thereto

[0148] In one embodiment, the invention provides CA specific antibodies. In a preferred embodiment, when the CA protein is to be used to generate antibodies, for example for immunotherapy, the CA protein should share at least one epitope or determinant with the full-length protein. By “epitope” or “determinant” herein is meant a portion of a protein that will generate and/or bind an antibody or T-cell receptor in the context of MHC. Thus, in most instances, antibodies made to a smaller CA protein will be able to bind to the full-length protein. In a preferred embodiment, the epitope is unique; that is, antibodies generated to a unique epitope show little or no cross-reactivity.

[0149] Any polypeptide sequence encoded by the CA polynucleotide sequences may be analyzed to determine certain preferred regions of the polypeptide. Regions of high antigenicity are determined from data by DNASTAR analysis by choosing values that represent regions of the polypeptide that are likely to be exposed on the surface of the polypeptide in an environment in which antigen recognition may occur in the process of initiation of an immune response. For example, the amino acid sequence of a polypeptide encoded by a CA polynucleotide sequence may be analyzed using the default parameters of the DNASTAR computer algorithm (DNASTAR, Inc., Madison, Wis.; http://www.dnastar.com/).

[0150] Polypeptide features that may be routinely obtained using the DNASTAR computer algorithm include, but are not limited to, Gamier-Robson alpha-regions, beta-regions, turn-regions, and coil-regions (Gamier et al. J. Mol. Biol., 120: 97 (1978)); Chou-Fasman alpha-regions, beta-regions, and turn-regions (Adv. in Enzymol., 47:45-148 (1978)); Kyte-Doolittle hydrophilic regions and hydrophobic regions (J. Mol. Biol., 157:105-132 (1982)); Eisenberg alpha- and beta-amphipathic regions; Karplus-Schulz flexible regions; Emini surface-forming regions (J. Virol., 55(3):836-839 (1985)); and Jameson-Wolf regions of high antigenic index (CABIOS, 4(1):181-186 (1988)). Kyte-Doolittle hydrophilic regions and hydrophobic regions, Emini surface-forming regions, and Jameson-Wolf regions of high antigenic index (i.e., containing four or more contiguous amino acids having an antigenic index of greater than or equal to 1.5, as identified using the default parameters of the Jameson-Wolf program) can routinely be used to determine polypeptide regions that exhibit a high degree of potential for antigenicity. One approach for preparing antibodies to a protein is the selection and preparation of an amino acid sequence of all or part of the protein, chemically synthesizing the sequence and injecting it into an appropriate animal, typically a rabbit, hamster or a mouse. Oligopeptides can be selected as candidates for the production of an antibody to the CA protein based upon the oligopeptides lying in hydrophilic regions, which are thus likely to be exposed in the mature protein. Additional oligopeptides can be determined using, for example, the Antigenicity Index, Welling, G. W. et al., FEBS Lett. 188:215-218 (1985), incorporated herein by reference.

[0151] In one embodiment, the term “antibody” includes antibody fragments, as are known in the art, including Fab, Fab₂, single chain antibodies (Fv for example), chimeric antibodies, etc., either produced by the modification of whole antibodies or those synthesized de novo using recombinant DNA technologies.

[0152] Methods of preparing polyclonal antibodies are known to the skilled artisan. Polyclonal antibodies can be raised in a mammal, for example, by one or more injections of an immunizing agent and, if desired, an adjuvant. Typically, the immunizing agent and/or adjuvant will be injected in the mammal by multiple subcutaneous or intraperitoneal injections. The immunizing agent may include a protein encoded by a nucleic acid of the figures or fragment thereof or a fusion protein thereof. It may be useful to conjugate the immunizing agent to a protein known to be immunogenic in the mammal being immunized. Examples of such immunogenic proteins include but are not limited to keyhole limpet hemocyanin, serum albumin, bovine thyroglobulin, and soybean trypsin inhibitor. Examples of adjuvants that may be employed include Freund's complete adjuvant and MPL-TDM adjuvant (monophosphoryl Lipid A, synthetic trehalose dicorynomycolate). The immunization protocol may be selected by one skilled in the art without undue experimentation.

[0153] The antibodies may, alternatively, be monoclonal antibodies. Monoclonal antibodies may be prepared using hybridoma methods, such as those described by Kohler and Milstein, Nature, 256:495 (1975). In a hybridoma method, a mouse, hamster, or other appropriate host animal, is typically immunized with an immunizing agent to elicit lymphocytes that produce or are capable of producing antibodies that will specifically bind to the immunizing agent. Alternatively, the lymphocytes may be immunized in vitro. The immunizing agent will typically include a polypeptide encoded by a nucleic acid of Tables 1-10, or fragment thereof or a fusion protein thereof. Generally, either peripheral blood lymphocytes (“PBLs”) are used if cells of human origin are desired, or spleen cells or lymph node cells are used if non-human mammalian sources are desired. The lymphocytes are then fused with an immortalized cell line using a suitable fusing agent, such as polyethylene glycol, to form a hybridoma cell (Goding, Monoclonal Antibodies: Principles and Practice, Academic Press, (1986) pp. 59-103). Immortalized cell lines are usually transformed mammalian cells, particularly myeloma cells of rodent, bovine and human origin. Usually, rat or mouse myeloma cell lines are employed. The hybridoma cells may be cultured in a suitable culture medium that preferably contains one or more substances that inhibit the growth or survival of the unfused, immortalized cells. For example, if the parental cells lack the enzyme hypoxanthine guanine phosphoribosyl transferase (HGPRT or HPRT), the culture medium for the hybridomas typically will include hypoxanthine, aminopterin, and thymidine (“HAT medium”), which substances prevent the growth of HGPRT-deficient cells.

[0154] Monoclonal antibody technology is used in implementing research, diagnosis and therapy. Monoclonal antibodies are used in radioimmunoassays, enzyme-linked immunosorbent assays, immunocytopathology, and flow cytometry for in vitro diagnosis, and in vivo for diagnosis and immunotherapy of human disease. Waldmann, T. A. (1991) Science 252:1657-1662. In particular, monoclonal antibodies have been widely applied to the diagnosis and therapy of cancer, wherein it is desirable to target malignant lesions while avoiding normal tissue. See, e.g., U.S. Pat. Nos. 4,753,894 to Frankel, et al.; 4,938,948 to Ring et al.; and 4,956,453 to Bjorn et al.

[0155] In one embodiment, the antibodies are bispecific antibodies. Bispecific antibodies are monoclonal, preferably human or humanized, antibodies that have binding specificities for at least two different antigens. A number of “humanized” antibody molecules comprising an antigen-binding site derived from a non-human immunoglobulin have been described, including chimeric antibodies having rodent V regions and their associated CDRs fused to human constant domains (Winter et al. (1991) Nature 349:293-299; Lobuglio et al. (1989) Proc. Nat. Acad. Sci. USA 86:4220-4224; Shaw et al. (1987) J Immunol. 138:4534-4538; and Brown et al. (1987) Cancer Res. 47:3577-3583), rodent CDRs grafted into a human supporting FR prior to fusion with an appropriate human antibody constant domain (Riechmann et al. (1988) Nature 332:323-327; Verhoeyen et al. (1988) Science 239:1534-1536; and Jones et al. (1986) Nature 321:522-525), and rodent CDRs supported by recombinantly veneered rodent FRs (European Patent Publication No. 519,596, published Dec. 23, 1992). These “humanized” molecules are designed to minimize unwanted immunological response toward rodent antihuman antibody molecules which limits the duration and effectiveness of therapeutic applications of those moieties in human recipients. In the present case, one of the binding specificities is for a protein encoded by a nucleic acid of Tables 1-10, or a fragment thereof, the other one is for any other antigen, and preferably for a cell-surface protein or receptor or receptor subunit, preferably one that is tumor specific.

[0156] In a preferred embodiment, the antibodies to CA are capable of reducing or eliminating the biological function of CA, as is described below. That is, the addition of anti-CA antibodies (either polyclonal or preferably monoclonal) to CA (or cells containing CA) may reduce or eliminate the CA activity. Generally, at least a 25% decrease in activity is preferred, with at least about 50% being particularly preferred and about a 95-100% decrease being especially preferred.

[0157] In a preferred embodiment the antibodies to the CA proteins are humanized antibodies. “Humanized” antibodies refer to a molecule having an antigen binding site that is substantially derived from an immunoglobulin from a non-human species and the remaining immunoglobulin structure of the molecule based upon the structure and/or sequence of a human immunoglobulin. The antigen binding site may comprise either complete variable domains fused onto constant domains or only the complementarity determining regions (CDRs) grafted onto appropriate framework regions in the variable domains. Antigen binding sites may be wild type or modified by one or more amino acid substitutions, e.g., modified to resemble human immunoglobulin more closely. Alternatively, a humanized antibody may be derived from a chimeric antibody that retains or substantially retains the antigen-binding properties of the parental, non-human, antibody but which exhibits diminished immunogenicity as compared to the parental antibody when administered to humans. The phrase “chimeric antibody,” as used herein, refers to an antibody containing sequence derived from two different antibodies (see, e.g., U.S. Pat. No. 4,816,567) that typically originate from different species. Typically, in these chimeric antibodies, the variable region of both light and heavy chains mimics the variable regions of antibodies derived from one species of mammals, while the constant portions are homologous to the sequences in antibodies derived from another. Most typically, chimeric antibodies comprise human and murine antibody fragments, generally human constant and mouse variable regions. Humanized antibodies include human immunoglobulins (recipient antibody) in which residues form a complementary determining region (CDR) of the recipient are replaced by residues from a CDR of a non-human species (donor antibody) such as mouse, rat or rabbit having the desired specificity, affinity and capacity. In some instances, Fv framework residues of the human immunoglobulin are replaced by corresponding non-human residues. Humanized antibodies may also comprise residues that are found neither in the recipient antibody nor in the imported CDR or framework sequences. In general, the humanized antibody will comprise substantially all of at least one, and typically two, variable domains, in which all or substantially all of the CDR regions correspond to those of a non-human immunoglobulin and all or substantially all of the framework residues (FR) regions are those of a human immunoglobulin consensus sequence. The humanized antibody optimally also will comprise at least a portion of an immunoglobulin constant region (Fc), typically that of a human immunoglobulin (Jones et al., Nature, 321:522-525 (1986); Riechmann et al., Nature, 332:323-329 (1988); and Presta, Curr. Op. Struct. Biol., 2:593-596 (1992)). One clear advantage to such chimeric forms is that, for example, the variable regions can conveniently be derived from presently known sources using readily available hybridomas or B cells from non human host organisms in combination with constant regions derived from, for example, human cell preparations. While the variable region has the advantage of ease of preparation, and the specificity is not affected by its source, the constant region being human, is less likely to elicit an immune response from a human subject when the antibodies are injected than would the constant region from a non-human source. However, the definition is not limited to this particular example.

[0158] Because humanized antibodies are far less immunogenic in humans than the parental mouse monoclonal antibodies, they can be used for the treatment of humans with far less risk of anaphylaxis. Thus, these antibodies may be preferred in therapeutic applications that involve in vivo administration to a human such as, e.g., use as radiation sensitizers for the treatment of neoplastic disease or use in methods to reduce the side effects of, e.g., cancer therapy. Methods for humanizing non-human antibodies are well known in the art. Generally, a humanized antibody has one or more amino acid residues introduced into it from a source that is non-human. These non-human amino acid residues are often referred to as import residues, which are typically taken from an import variable domain. Humanization can be essentially performed following the method of Winter and co-workers (Jones et al., Nature 321:522-525 (1986); Riechmann et al., Nature 332:323-327 (1988); Verhoeyen et al., Science 239:1534-1536 (1988)), by substituting rodent CDRs or CDR sequences for the corresponding sequences of a human antibody. Accordingly, such humanized antibodies are chimeric antibodies (U.S. Pat. No. 4,816,567), wherein substantially less than an intact human variable domain has been substituted by the corresponding sequence from a non-human species. In practice, humanized antibodies are typically human antibodies in which some CDR residues and possibly some FR residues are substituted by residues from analogous sites in rodent antibodies.

[0159] Human antibodies can also be produced using various techniques known in the art, including phage display libraries [Hoogenboom and Winter, J. Mol. Biol., 227:381 (1991); Marks et al., J. Mol. Biol., 222:581 (1991)]. The techniques of Cole et al. and Boerner et al. are also available for the preparation of human monoclonal antibodies [Cole et al., Monoclonal Antibodies and Cancer Therapy, Alan R. Liss, p. 77 (1985) and Boerner et al., J. Immunol., 147(1):86-95 (1991)]. Humanized antibodies may be achieved by a variety of methods including, for example: (1) grafting the non-human complementarity determining regions (CDRs) onto a human framework and constant region (a process referred to in the art as “humanizing”), or, alternatively, (2) transplanting the entire non-human variable domains, but “cloaking” them with a human-like surface by replacement of surface residues (a process referred to in the art as “veneering”). In the present invention, humanized antibodies will include both “humanized” and “veneered” antibodies. Similarly, human antibodies can be made by introducing human immunoglobulin loci into transgenic animals, e.g., mice in which the endogenous immunoglobulin genes have been partially or completely inactivated. Upon challenge, human antibody production is observed, which closely resembles that seen in humans in all respects, including gene rearrangement, assembly, and antibody repertoire. This approach is described, for example, in U.S. Pat. Nos. 5,545,807; 5,545,806; 5,569,825; 5,625,126; 5,633,425; 5,661,016, and in the following scientific publications: Marks et al., Bio/Technology 10, 779-783 (1992); Lonberg et al., Nature 368 856-859 (1994); Morrison, Nature 368, 812-13 (1994); Fishwild et al., Nature Biotechnology 14, 845-51 (1996); Neuberger, Nature Biotechnology 14, 826 (1996); Lonberg and Huszar, Intern. Rev. Immunol. 13 65-93 (1995); Jones et al., Nature 321:522-525 (1986); Morrison et al., Proc. Natl. Acad. Sci, US.A., 81:6851-6855 (1984); Morrison and Oi, Adv. Immunol., 44:65-92 (1988); Verhoeyer et al., Science 239:1534-1536 (1988); Padlan, Molec. Immun. 28:489-498 (1991); Padlan, Molec. Immunol. 31(3):169-217 (1994); and Kettleborough, C. A. et al., Protein Eng. 4(7):773-83 (1991) each of which is incorporated herein by reference.

[0160] The phrase “complementarity determining region” refers to amino acid sequences which together define the binding affinity and specificity of the natural Fv region of a native immunoglobulin binding site. See, e.g., Chothia et al., J. Mol. Biol. 196:901-917 (1987); Kabat et al., U.S. Dept. of Health and Human Services NIH Publication No. 91-3242 (1991). The phrase “constant region” refers to the portion of the antibody molecule that confers effector functions. In the present invention, mouse constant regions are substituted by human constant regions. The constant regions of the subject humanized antibodies are derived from human immunoglobulins. The heavy chain constant region can be selected from any of the five isotypes: alpha, delta, epsilon, gamma or mu. One method of humanizing antibodies comprises aligning the non-human heavy and light chain sequences to human heavy and light chain sequences, selecting and replacing the non-human framework with a human framework based on such alignment, molecular modeling to predict the conformation of the humanized sequence and comparing to the conformation of the parent antibody. This process is followed by repeated back mutation of residues in the CDR region that disturb the structure of the CDRs until the predicted conformation of the humanized sequence model closely approximates the conformation of the non-human CDRs of the parent non-human antibody. Such humanized antibodies may be further derivatized to facilitate uptake and clearance, e.g, via Ashwell receptors. See, e.g., U.S. Pat. Nos. 5,530,101 and 5,585,089 which are incorporated herein by reference.

[0161] Humanized antibodies to CA polypeptides can also be produced using transgenic animals that are engineered to contain human immunoglobulin loci. For example, WO 98/24893 discloses transgenic animals having a human Ig locus wherein the animals do not produce functional endogenous immunoglobulins due to the inactivation of endogenous heavy and light chain loci. WO 91/10741 also discloses transgenic non-primate mammalian hosts capable of mounting an immune response to an immunogen, wherein the antibodies have primate constant and/or variable regions, and wherein the endogenous immunoglobulin-encoding loci are substituted or inactivated. WO 96/30498 discloses the use of the Cre/Lox system to modify the immunoglobulin locus in a mammal, such as to replace all or a portion of the constant or variable region to form a modified antibody molecule. WO 94/02602 discloses non-human mammalian hosts having inactivated endogenous Ig loci and functional human Ig loci. U.S. Pat. No. 5,939,598 discloses methods of making transgenic mice in which the mice lack endogenous heavy chains, and express an exogenous immunoglobulin locus comprising one or more xenogeneic constant regions.

[0162] Using a transgenic animal described above, an immune response can be produced to a selected antigenic molecule, and antibody-producing cells can be removed from the animal and used to produce hybridomas that secrete human monoclonal antibodies. Immunization protocols, adjuvants, and the like are known in the art, and are used in immunization of, for example, a transgenic mouse as described in WO 96/33735. The monoclonal antibodies can be tested for the ability to inhibit or neutralize the biological activity or physiological effect of the corresponding protein.

[0163] In the present invention, CA polypeptides of the invention and variants thereof are used to immunize a transgenic animal as described above. Monoclonal antibodies are made using methods known in the art, and the specificity of the antibodies is tested using isolated CA polypeptides. Methods for preparation of the human or primate CA or an epitope thereof include, but are not limited to chemical synthesis, recombinant DNA techniques or isolation from biological samples. Chemical synthesis of a peptide can be performed, for example, by the classical Merrifeld method of solid phase peptide synthesis (Merrifeld, J. Am. Chem. Soc. 85:2149, 1963 which is incorporated by reference) or the FMOC strategy on a Rapid Automated Multiple Peptide Synthesis system (E. I. du Pont de Nemours Company, Wilmington, DE) (Caprino and Han, J. Org. Chem. 37:3404, 1972 which is incorporated by reference).

[0164] Polyclonal antibodies can be prepared by immunizing rabbits or other animals by injecting antigen followed by subsequent boosts at appropriate intervals. The animals are bled and sera assayed against purified CA proteins usually by ELISA or by bioassay based upon the ability to block the action of CA proteins. When using avian species, e.g., chicken, turkey and the like, the antibody can be isolated from the yolk of the egg. Monoclonal antibodies can be prepared after the method of Milstein and Kohler by fusing splenocytes from immunized mice with continuously replicating tumor cells such as myeloma or lymphoma cells. (Milstein and Kohler, Nature 256:495-497, 1975; Gulfre and Milstein, Methods in Enzymology: Immunochemical Techniques 73:1-46, Langone and Banatis eds., Academic Press, 1981 which are incorporated by reference). The hybridoma cells so formed are then cloned by limiting dilution methods and supernates assayed for antibody production by ELISA, RIA or bioassay.

[0165] The unique ability of antibodies to recognize and specifically bind to target proteins provides an approach for treating an overexpression of the protein. Thus, another aspect of the present invention provides for a method for preventing or treating diseases involving overexpression of a CA polypeptide by treatment of a patient with specific antibodies to the CA protein.

[0166] Specific antibodies, either polyclonal or monoclonal, to the CA proteins can be produced by any suitable method known in the art as discussed above. For example, murine or human monoclonal antibodies can be produced by hybridoma technology or, alternatively, the CA proteins, or an immunologically active fragment thereof, or an anti-idiotypic antibody, or fragment thereof can be administered to an animal to elicit the production of antibodies capable of recognizing and binding to the CA proteins. Such antibodies can be from any class of antibodies including, but not limited to IgG, IgA, IgM, IgD, and IgE or in the case of avian species, IgY and from any subclass of antibodies.

[0167] By immunotherapy is meant treatment of a cancer with an antibody raised against a CA protein. As used herein, immunotherapy can be passive or active. Passive immunotherapy as defined herein is the passive transfer of antibody to a recipient (patient). Active immunization is the induction of antibody and/or T-cell responses in a recipient (patient). Induction of an immune response is the result of providing the recipient with an antigen to which antibodies are raised. As appreciated by one of ordinary skill in the art, the antigen may be provided by injecting a polypeptide against which antibodies are desired to be raised into a recipient, or contacting the recipient with a nucleic acid capable of expressing the antigen and under conditions for expression of the antigen.

[0168] In a preferred embodiment, oncogenes which encode secreted growth factors may be inhibited by raising antibodies against CA proteins that are secreted proteins as described above. Without being bound by theory, antibodies used for treatment, bind and prevent the secreted protein from binding to its receptor, thereby inactivating the secreted CA protein.

[0169] In another preferred embodiment, the CA protein to which antibodies are raised is a transmembrane protein. Without being bound by theory, antibodies used for treatment, bind the extracellular domain of the CA protein and prevent it from binding to other proteins, such as circulating ligands or cell-associated molecules. The antibody may cause down-regulation of the transmembrane CA protein. As will be appreciated by one of ordinary skill in the art, the antibody may be a competitive, non-competitive or uncompetitive inhibitor of protein binding to the extracellular domain of the CA protein. The antibody is also an antagonist of the CA protein. Further, the antibody prevents activation of the transmembrane CA protein. In one aspect, when the antibody prevents the binding of other molecules to the CA protein, the antibody prevents growth of the cell. The antibody may also sensitize the cell to cytotoxic agents, including, but not limited to TNF-α, TNF-γ, IL-1, INF-γ and IL-2, or chemotherapeutic agents including 5FU, vinblastine, actinomycin D, cisplatin, methotrexate, and the like. In some instances the antibody belongs to a sub-type that activates serum complement when complexed with the transmembrane protein thereby mediating cytotoxicity. Thus, cancers may be treated by administering to a patient antibodies directed against the transmembrane CA protein.

[0170] In another preferred embodiment, the antibody is conjugated to a therapeutic moiety. In one aspect the therapeutic moiety is a small molecule that modulates the activity of the CA protein. In another aspect the therapeutic moiety modulates the activity of molecules associated with or in close proximity to the CA protein. The therapeutic moiety may inhibit enzymatic activity such as protease or protein kinase activity associated with cancer.

[0171] In a preferred embodiment, the therapeutic moiety may also be a cytotoxic agent. In this method, radioisotopes, natural toxins, chemotherapy agents, or other substances (such as biological response modifiers) are chemically linked or conjugated to a monoclonal antibody to form “immunoconjugates” and “immunotoxins” which target the cytotoxic agent to tumor tissue or cells resulting in a reduction in the number of afflicted cells, thereby reducing symptoms associated with cancers, including lymphoma. Cytotoxic agents are numerous and varied and include, but are not limited to, cytotoxic drugs or toxins or active fragments of such toxins. Suitable toxins and their corresponding fragments include diphtheria A chain, exotoxin A chain, ricin A chain, abrin A chain, curcin, crotin, phenomycin, enomycin and the like. Cytotoxic agents also include radiochemicals made by conjugating radioisotopes to antibodies raised against CA proteins, or binding of a radionuclide to a chelating agent that has been covalently attached to the antibody. Targeting the therapeutic moiety to transmembrane CA proteins not only serves to increase the local concentration of therapeutic moiety in the cancer of interest, i.e., lymphoma, but also serves to reduce deleterious side effects that may be associated with the therapeutic moiety. A number of investigators have used monoclonal antibodies as carriers of cytotoxic substances in attempts to selectively direct those agents to malignant tissue. More particularly, a number of monoclonal antibodies have been conjugated to toxins such as ricin, abrin, diphtheria toxin and Pseudomonas exotoxin or to enzymatically active portions (A chains) thereof via heterobifunctional agents. See, e.g., U.S. Pat. No. 4,753,894 to Frankel et al.; Nevelle, et al. (1982) Immunol Rev 62:75-91; Ross et al. (1980) Eur. J. Biochem 104; Vitteta et al. (1982) Immunol Rev 62:158-183; Raso et al. (1982) Cancer Res 42:457-464, and Trowbridge et al. (1981) Nature 294:171-173.

[0172] In another preferred embodiment, the CA protein against which the antibodies are raised is an intracellular protein. In this case, the antibody may be conjugated to a protein that facilitates entry into the cell. In one case, the antibody enters the cell by endocytosis. In another embodiment, a nucleic acid encoding the antibody is administered to the individual or cell. Moreover, wherein the CA protein can be targeted within a cell, e.g., the nucleus, an antibody thereto contains a signal for that target localization, e.g., a nuclear localization signal.

[0173] The CA antibodies of the invention specifically bind to CA proteins. By “specifically bind” herein is meant that the antibodies bind to the protein with a binding constant in the range of 10⁻⁴-10⁻⁶ M⁻¹, with a preferred range being 10⁻⁷-10⁻⁹ M⁻¹.

[0174] In a preferred embodiment, the CA protein is purified or isolated after expression. CA proteins may be isolated or purified in a variety of ways known to those skilled in the art depending on what other components are present in the sample. Standard purification methods include electrophoretic, molecular, immunological and chromatographic techniques, including ion exchange, hydrophobic, affinity, and reverse-phase HPLC chromatography, and chromatofocusing. For example, the CA protein may be purified using a standard anti-CA antibody column. Ultrafiltration and diafiltration techniques, in conjunction with protein concentration, are also useful. For general guidance in suitable purification techniques, see Scopes, R., Protein Purification, Springer-Verlag, NY (1982). The degree of purification necessary will vary depending on the use of the CA protein. In some instances no purification will be necessary.

Detection of Cancer Phenotype

[0175] Once expressed and purified if necessary, the CA proteins and nucleic acids are useful in a number of applications. In one aspect, the expression levels of genes are determined for different cellular states in the cancer phenotype; that is, the expression levels of genes in normal tissue and in cancer tissue (and in some cases, for varying severities of lymphoma that relate to prognosis, as outlined below) are evaluated to provide expression profiles. An expression profile of a particular cell state or point of development is essentially a “fingerprint” of the state; while two states may have any particular gene similarly expressed, the evaluation of a number of genes simultaneously allows the generation of a gene expression profile that is unique to the state of the cell. By comparing expression profiles of cells in different states, information regarding which genes are important (including both up- and down-regulation of genes) in each of these states is obtained. Then, diagnosis may be done or confirmed: does tissue from a particular patient have the gene expression profile of normal or cancer tissue.

[0176] “Differential expression,” or equivalents used herein, refers to both qualitative as well as quantitative differences in the temporal and/or cellular expression patterns of genes, within and among the cells. Thus, a differentially expressed gene can qualitatively have its expression altered, including an activation or inactivation, in, for example, normal versus cancer tissue. That is, genes may be turned on or turned off in a particular state, relative to another state. As is apparent to the skilled artisan, any comparison of two or more states can be made. Such a qualitatively regulated gene will exhibit an expression pattern within a state or cell type which is detectable by standard techniques in one such state or cell type, but is not detectable in both. Alternatively, the determination is quantitative in that expression is increased or decreased; that is, the expression of the gene is either up-regulated, resulting in an increased amount of transcript, or down-regulated, resulting in a decreased amount of transcript. The degree to which expression differs need only be large enough to quantify via standard characterization techniques as outlined below, such as by use of Affymetrix GeneChip® expression arrays, Lockhart, Nature Biotechnology, 14:1675-1680 (1996), hereby expressly incorporated by reference. Other techniques include, but are not limited to, quantitative reverse transcriptase PCR, Northern analysis and RNase protection. As outlined above, preferably the change in expression (i.e. upregulation or downregulation) is at least about 50%, more preferably at least about 100%, more preferably at least about 150%, more preferably, at least about 200%, with from 300 to at least 1000% being especially preferred.

[0177] As will be appreciated by those in the art, this may be done by evaluation at either the gene transcript, or the protein level; that is, the amount of gene expression may be monitored using nucleic acid probes to the DNA or RNA equivalent of the gene transcript, and the quantification of gene expression levels, or, alternatively, the final gene product itself (protein) can be monitored, for example through the use of antibodies to the CA protein and standard immunoassays (ELISAS, etc.) or other techniques, including mass spectroscopy assays, 2D gel electrophoresis assays, etc. Thus, the proteins corresponding to CA genes, i.e. those identified as being important in a particular cancer phenotype, i.e., lymphoma, can be evaluated in a diagnostic test specific for that cancer.

[0178] In a preferred embodiment, gene expression monitoring is done and a number of genes, i.e. an expression profile, is monitored simultaneously, although multiple protein expression monitoring can be done as well. Similarly, these assays may be done on an individual basis as well.

[0179] In this embodiment, the CA nucleic acid probes may be attached to biochips as outlined herein for the detection and quantification of CA sequences in a particular cell. The assays are done as is known in the art. As will be appreciated by those in the art, any number of different CA sequences may be used as probes, with single sequence assays being used in some cases, and a plurality of the sequences described herein being used in other embodiments. In addition, while solid-phase assays are described, any number of solution based assays may be done as well.

[0180] In a preferred embodiment, both solid and solution based assays may be used to detect CA sequences that are up-regulated or down-regulated in cancers as compared to normal tissue. In instances where the CA sequence has been altered but shows the same expression profile or an altered expression profile, the protein will be detected as outlined herein.

[0181] In a preferred embodiment nucleic acids encoding the CA protein are detected. Although DNA or RNA encoding the CA protein may be detected, of particular interest are methods wherein the mRNA encoding a CA protein is detected. The presence of mRNA in a sample is an indication that the CA gene has been transcribed to form the mRNA, and suggests that the protein is expressed. Probes to detect the mRNA can be any nucleotide/deoxynucleotide probe that is complementary to and base pairs with the mRNA and includes but is not limited to oligonucleotides, cDNA or RNA. Probes also should contain a detectable label, as defined herein. In one method the mRNA is detected after immobilizing the nucleic acid to be examined on a solid support such as nylon membranes and hybridizing the probe with the sample. Following washing to remove the non-specifically bound probe, the label is detected. In another method detection of the mRNA is performed in situ. In this method permeabilized cells or tissue samples are contacted with a detectably labeled nucleic acid probe for sufficient time to allow the probe to hybridize with the target mRNA. Following washing to remove the non-specifically bound probe, the label is detected. For example a digoxygenin labeled riboprobe (RNA probe) that is complementary to the mRNA encoding a CA protein is detected by binding the digoxygenin with an anti-digoxygenin secondary antibody and developed with nitro blue tetrazolium and 5-bromo-4-chloro-3-indoyl phosphate.

[0182] In a preferred embodiment, any of the three classes of proteins as described herein (secreted, transmembrane or intracellular proteins) are used in diagnostic assays. The CA proteins, antibodies, nucleic acids, modified proteins and cells containing CA sequences are used in diagnostic assays. This can be done on an individual gene or corresponding polypeptide level, or as sets of assays.

[0183] As described and defined herein, CA proteins find use as markers of cancers, including lymphomas such as, but not limited to, Hodgkin's and non-Hodgkin's lymphoma. Detection of these proteins in putative cancer tissue or patients allows for a determination or diagnosis of the type of cancer. Numerous methods known to those of ordinary skill in the art find use in detecting cancers. In one embodiment, antibodies are used to detect CA proteins. A preferred method separates proteins from a sample or patient by electrophoresis on a gel (typically a denaturing and reducing protein gel, but may be any other type of gel including isoelectric focusing gels and the like). Following separation of proteins, the CA protein is detected by immunoblotting with antibodies raised against the CA protein. Methods of immunoblotting are well known to those of ordinary skill in the art.

[0184] In another preferred method, antibodies to the CA protein find use in in situ imaging techniques. In this method cells are contacted with from one to many antibodies to the CA protein(s). Following washing to remove non-specific antibody binding, the presence of the antibody or antibodies is detected. In one embodiment the antibody is detected by incubating with a secondary antibody that contains a detectable label. In another method the primary antibody to the CA protein(s) contains a detectable label. In another preferred embodiment each one of multiple primary antibodies contains a distinct and detectable label. This method finds particular use in simultaneous screening for a plurality of CA proteins. As will be appreciated by one of ordinary skill in the art, numerous other histological imaging techniques are useful in the invention.

[0185] In a preferred embodiment the label is detected in a fluorometer that has the ability to detect and distinguish emissions of different wavelengths. In addition, a fluorescence activated cell sorter (FACS) can be used in the method.

[0186] In another preferred embodiment, antibodies find use in diagnosing cancers from blood samples. As previously described, certain CA proteins are secreted/circulating molecules. Blood samples, therefore, are useful as samples to be probed or tested for the presence of secreted CA proteins. Antibodies can be used to detect the CA proteins by any of the previously described immunoassay techniques including ELISA, immunoblotting (Western blotting), immunoprecipitation, BIACORE technology and the like, as will be appreciated by one of ordinary skill in the art.

[0187] In a preferred embodiment, in situ hybridization of labeled CA nucleic acid probes to tissue arrays is done. For example, arrays of tissue samples, including CA tissue and/or normal tissue, are made. In situ hybridization as is known in the art can then be done.

[0188] It is understood that when comparing the expression fingerprints between an individual and a standard, the skilled artisan can make a diagnosis as well as a prognosis. It is further understood that the genes that indicate diagnosis may differ from those that indicate prognosis.

[0189] In a preferred embodiment, the CA proteins, antibodies, nucleic acids, modified proteins and cells containing CA sequences are used in prognosis assays. As above, gene expression profiles can be generated that correlate to cancer, especially lymphoma, severity, in terms of long term prognosis. Again, this may be done on either a protein or gene level, with the use of genes being preferred. As above, the CA probes are attached to biochips for the detection and quantification of CA sequences in a tissue or patient. The assays proceed as outlined for diagnosis.

Screening for CA-Targeted Drugs

[0190] In one embodiment, any of the CA sequences as described herein are used in drug screening assays. The CA proteins, antibodies, nucleic acids, modified proteins and cells containing CA sequences are used in drug screening assays or by evaluating the effect of drug candidates on a “gene expression profile” or expression profile of polypeptides. In one embodiment, the expression profiles are used, preferably in conjunction with high throughput screening techniques to allow monitoring for expression profile genes after treatment with a candidate agent, Zlokamik, et al., Science 279, 84-8 (1998), Heid, et al., Genome Res., 6:986-994 (1996).

[0191] In another embodiment, the CA proteins, antibodies, nucleic acids, modified proteins and cells containing the native or modified CA proteins are used in screening assays. That is, the present invention provides novel methods for screening for compositions that modulate the cancer phenotype. As above, this can be done by screening for modulators of gene expression or for modulators of protein activity. Similarly, this may be done on an individual gene or protein level or by evaluating the effect of drug candidates on a “gene expression profile”. In a preferred embodiment, the expression profiles are used, preferably in conjunction with high throughput screening techniques to allow monitoring for expression profile genes after treatment with a candidate agent, see Zlokarnik, supra.

[0192] Having identified the CA genes herein, a variety of assays to evaluate the effects of agents on gene expression may be executed. In a preferred embodiment, assays may be run on an individual gene or protein level. That is, having identified a particular gene as aberrantly regulated in cancer, candidate bioactive agents may be screened to modulate the gene's regulation. “Modulation” thus includes both an increase and a decrease in gene expression or activity. The preferred amount of modulation will depend on the original change of the gene expression in normal versus tumor tissue, with changes of at least 10%, preferably 50%, more preferably 100-300%, and in some embodiments 300-1000% or greater. Thus, if a gene exhibits a 4 fold increase in tumor compared to normal tissue, a decrease of about four fold is desired; a 10 fold decrease in tumor compared to normal tissue gives a 10 fold increase in expression for a candidate agent is desired, etc. Alternatively, where the CA sequence has been altered but shows the same expression profile or an altered expression profile, the protein will be detected as outlined herein.

[0193] As will be appreciated by those in the art, this may be done by evaluation at either the gene or the protein level; that is, the amount of gene expression may be monitored using nucleic acid probes and the quantification of gene expression levels, or, alternatively, the level of the gene product itself can be monitored, for example through the use of antibodies to the CA protein and standard immunoassays. Alternatively, binding and bioactivity assays with the protein may be done as outlined below.

[0194] In a preferred embodiment, gene expression monitoring is done and a number of genes, i.e. an expression profile, is monitored simultaneously, although multiple protein expression monitoring can be done as well.

[0195] In this embodiment, the CA nucleic acid probes are attached to biochips as outlined herein for the detection and quantification of CA sequences in a particular cell. The assays are further described below.

[0196] Generally, in a preferred embodiment, a candidate bioactive agent is added to the cells prior to analysis. Moreover, screens are provided to identify a candidate bioactive agent that modulates a particular type of cancer, modulates CA proteins, binds to a CA protein, or interferes between the binding of a CA protein and an antibody.

[0197] The term “candidate bioactive agent” or “drug candidate” or grammatical equivalents as used herein describes any molecule, e.g., protein, oligopeptide, small organic or inorganic molecule, polysaccharide, polynucleotide, etc., to be tested for bioactive agents that are capable of directly or indirectly altering either the cancer phenotype, binding to and/or modulating the bioactivity of a CA protein, or the expression of a CA sequence, including both nucleic acid sequences and protein sequences. In a particularly preferred embodiment, the candidate agent suppresses a CA phenotype, for example to a normal tissue fingerprint. Similarly, the candidate agent preferably suppresses a severe CA phenotype. Generally a plurality of assay mixtures are run in parallel with different agent concentrations to obtain a differential response to the various concentrations. Typically, one of these concentrations serves as a negative control, i.e., at zero concentration or below the level of detection.

[0198] In one aspect, a candidate agent will neutralize the effect of a CA protein. By “neutralize” is meant that activity of a protein is either inhibited or counter acted against so as to have substantially no effect on a cell.

[0199] Candidate agents encompass numerous chemical classes, though typically they are organic or inorganic molecules, preferably small organic compounds having a molecular weight of more than 100 and less than about 2,500 Daltons. Preferred small molecules are less than 2000, or less than 1500 or less than 1000 or less than 500 D. Candidate agents comprise functional groups necessary for structural interaction with proteins, particularly hydrogen bonding, and typically include at least an amine, carbonyl, hydroxyl or carboxyl group, preferably at least two of the functional chemical groups. The candidate agents often comprise cyclical carbon or heterocyclic structures and/or aromatic or polyaromatic structures substituted with one or more of the above functional groups. Candidate agents are also found among biomolecules including peptides, saccharides, fatty acids, steroids, purines, pyrimidines, derivatives, structural analogs or combinations thereof. Particularly preferred are peptides.

[0200] Candidate agents are obtained from a wide variety of sources including libraries of synthetic or natural compounds. For example, numerous means are available for random and directed synthesis of a wide variety of organic compounds and biomolecules, including expression of randomized oligonucleotides. Alternatively, libraries of natural compounds in the form of bacterial, fungal, plant and animal extracts are available or readily produced. Additionally, natural or synthetically produced libraries and compounds are readily modified through conventional chemical, physical and biochemical means. Known pharmacological agents may be subjected to directed or random chemical modifications, such as acylation, alkylation, esterification, or amidification to produce structural analogs.

[0201] In one embodiment, the candidate bioactive agents are proteins. By “protein” herein is meant at least two covalently attached amino acids, which includes proteins, polypeptides, oligopeptides and peptides. The protein may be made up of naturally occurring amino acids and peptide bonds, or synthetic peptidomimetic structures. Thus “amino acid”, or “peptide residue”, as used herein means both naturally occurring and synthetic amino acids. For example, homo-phenylalanine, citrulline and norleucine are considered amino acids for the purposes of the invention. “Amino acid” also includes imino acid residues such as proline and hydroxyproline. The side chains may be in either the (R) or the (S) configuration. In the preferred embodiment, the amino acids are in the (S) or L-configuration. If non-naturally occurring side chains are used, non-amino acid substituents may be used, for example to prevent or retard in vivo degradations.

[0202] In a preferred embodiment, the candidate bioactive agents are naturally occurring proteins or fragments of naturally occurring proteins. Thus, for example, cellular extracts containing proteins, or random or directed digests of proteinaceous cellular extracts, may be used. In this way libraries of prokaryotic and eukaryotic proteins may be made for screening in the methods of the invention. Particularly preferred in this embodiment are libraries of bacterial, fungal, viral, and mammalian proteins, with the latter being preferred, and human proteins being especially preferred.

[0203] In another preferred embodiment, the candidate bioactive agents are peptides of from about 5 to about 30 amino acids, with from about 5 to about 20 amino acids being preferred, and from about 7 to about 15 being particularly preferred. The peptides may be digests of naturally occurring proteins as is outlined above, random peptides, or “biased” random peptides. By “randomized” or grammatical equivalents herein is meant that each nucleic acid and peptide consists of essentially random nucleotides and amino acids, respectively. Since generally these random peptides (or nucleic acids, discussed below) are chemically synthesized, they may incorporate any nucleotide or amino acid at any position. The synthetic process can be designed to generate randomized proteins or nucleic acids, to allow the formation of all or most of the possible combinations over the length of the sequence, thus forming a library of randomized candidate bioactive proteinaceous agents.

[0204] In one embodiment, the library is fully randomized, with no sequence preferences or constants at any position. In a preferred embodiment, the library is biased. That is, some positions within the sequence are either held constant, or are selected from a limited number of possibilities. For example, in a preferred embodiment, the nucleotides or amino acid residues are randomized within a defined class, for example, of hydrophobic amino acids, hydrophilic residues, sterically biased (either small or large) residues, towards the creation of nucleic acid binding domains, the creation of cysteines, for cross-linking, prolines for SH-3 domains, serines, threonines, tyrosines or histidines for phosphorylation sites, etc., or to purines, etc.

[0205] In one embodiment, the candidate bioactive agents are nucleic acids. As described generally for proteins, nucleic acid candidate bioactive agents may be naturally occurring nucleic acids, random nucleic acids, or “biased” random nucleic acids. In another embodiment, the candidate bioactive agents are organic chemical moieties, a wide variety of which are available in the literature.

[0206] In assays for testing alteration of the expression profile of one or more CA genes, after the candidate agent has been added and the cells allowed to incubate for some period of time, a nucleic acid sample containing the target sequences to be analyzed is prepared. The target sequence is prepared using known techniques (e.g., converted from RNA to labeled cDNA, as described above) and added to a suitable microarray. For example, an in vitro reverse transcription with labels covalently attached to the nucleosides is performed. Generally, the nucleic acids are labeled with a label as defined herein, especially with biotin-FITC or PE, Cy3 and Cy5.

[0207] As will be appreciated by those in the art, these assays can be direct hybridization assays or can comprise “sandwich assays”, which include the use of multiple probes, as is generally outlined in U.S. Pat. Nos. 5,681,702, 5,597,909, 5,545,730, 5,594,117, 5,591,584, 5,571,670, 5,580,731, 5,571,670, 5,591,584, 5,624,802, 5,635,352, 5,594,118, 5,359,100, 5,124,246 and 5,681,697, all of which are hereby incorporated by reference. In this embodiment, in general, the target nucleic acid is prepared as outlined above, and then added to the biochip comprising a plurality of nucleic acid probes, under conditions that allow the formation of a hybridization complex.

[0208] A variety of hybridization conditions may be used in the present invention, including high, moderate and low stringency conditions as outlined above. The assays are generally run under stringency conditions that allow formation of the label probe hybridization complex only in the presence of target. Stringency can be controlled by altering a step parameter that is a thermodynamic variable, including, but not limited to, temperature, formamide concentration, salt concentration, chaotropic salt concentration, pH, organic solvent concentration, etc. These parameters may also be used to control non-specific binding, as is generally outlined in U.S. Pat. No. 5,681,697. Thus it may be desirable to perform certain steps at higher stringency conditions to reduce non-specific binding.

[0209] The reactions outlined herein may be accomplished in a variety of ways, as will be appreciated by those in the art. Components of the reaction may be added simultaneously, or sequentially, in any order, with preferred embodiments outlined below. In addition, the reaction may include a variety of other reagents in the assays. These include reagents like salts, buffers, neutral proteins, e.g. albumin, detergents, etc which may be used to facilitate optimal hybridization and detection, and/or reduce non-specific or background interactions. Also reagents that otherwise improve the efficiency of the assay, such as protease inhibitors, nuclease inhibitors, anti-microbial agents, etc., may be used, depending on the sample preparation methods and purity of the target. In addition, either solid phase or solution based (i.e., kinetic PCR) assays may be used.

[0210] Once the assay is run, the data are analyzed to determine the expression levels, and changes in expression levels as between states, of individual genes, forming a gene expression profile.

[0211] In a preferred embodiment, as for the diagnosis and prognosis applications, having identified the differentially expressed gene(s) or mutated gene(s) important in any one state, screens can be run to test for alteration of the expression of the CA genes individually. That is, screening for modulation of regulation of expression of a single gene can be done. Thus, for example, in the case of target genes whose presence or absence is unique between two states, screening is done for modulators of the target gene expression.

[0212] In addition, screens can be done for novel genes that are induced in response to a candidate agent. After identifying a candidate agent based upon its ability to suppress a CA expression pattern leading to a normal expression pattern, or modulate a single CA gene expression profile so as to mimic the expression of the gene from normal tissue, a screen as described above can be performed to identify genes that are specifically modulated in response to the agent. Comparing expression profiles between normal tissue and agent treated CA tissue reveals genes that are not expressed in normal tissue or CA tissue, but are expressed in agent treated tissue. These agent specific sequences can be identified and used by any of the methods described herein for CA genes or proteins. In particular these sequences and the proteins they encode find use in marking or identifying agent-treated cells. In addition, antibodies can be raised against the agent-induced proteins and used to target novel therapeutics to the treated CA tissue sample.

[0213] Thus, in one embodiment, a candidate agent is administered to a population of CA cells, that thus has an associated CA expression profile. By “administration” or “contacting” herein is meant that the candidate agent is added to the cells in such a manner as to allow the agent to act upon the cell, whether by uptake and intracellular action, or by action at the cell surface. In some embodiments, nucleic acid encoding a proteinaceous candidate agent (i.e. a peptide) may be put into a viral construct such as a retroviral construct and added to the cell, such that expression of the peptide agent is accomplished; see PCT US97/01019, hereby expressly incorporated by reference.

[0214] Once the candidate agent has been administered to the cells, the cells can be washed if desired and are allowed to incubate under preferably physiological conditions for some period of time. The cells are then harvested and a new gene expression profile is generated, as outlined herein.

[0215] Thus, for example, CA tissue may be screened for agents that reduce or suppress the CA phenotype. A change in at least one gene of the expression profile indicates that the agent has an effect on CA activity. By defining such a signature for the CA phenotype, screens for new drugs that alter the phenotype can be devised. With this approach, the drug target need not be known and need not be represented in the original expression screening platform, nor does the level of transcript for the target protein need to change.

[0216] In a preferred embodiment, as outlined above, screens may be done on individual genes and gene products (proteins). That is, having identified a particular differentially expressed gene as important in a particular state, screening of modulators of either the expression of the gene or the gene product itself can be done. The gene products of differentially expressed genes are sometimes referred to herein as “CA proteins” or “CAP”. The CAP may be a fragment, or alternatively, be the full-length protein to the fragment encoded by the nucleic acids of Tables 1-10 (human genomic sequences of SEQ ID NOS: 4, 16, 24, 30, 36, 42, 54, 68, 80, and 88, and sequences of SEQ ID NOS: 5, 7, 9, 11, 17, 19, 25, 31, 37, 43, 45, 55, 57, 59, 61, 63, 69, 71, 73, 75, 81, 89, and 91 corresponding to the human mRNAs generated therefrom). In a preferred embodiment, the CAP is selected from the human protein sequences shown in Tables 1-10 (of SEQ ID NOS: 6, 8, 10, 12, 18, 20, 26, 32, 38, 44, 46, 56, 58, 60, 62, 64, 70, 72, 74, 76, 82, 90, and 92). In another embodiment, the sequences are sequence variants as further described herein.

[0217] Preferably, the CAP is a fragment approximately 14 to 24 amino acids in length. More preferably the fragment is a soluble fragment. Preferably, the fragment includes a non-transmembrane region. In a preferred embodiment, the fragment has an N-terminal Cys to aid in solubility. In one embodiment, the C-terminus of the fragment is kept as a free acid and the N-terminus is a free amine to aid in coupling, e.g., to a cysteine.

[0218] In one embodiment the CA proteins are conjugated to an immunogenic agent as discussed herein. In one embodiment the CA protein is conjugated to BSA.

[0219] In a preferred embodiment, screening is done to alter the biological function of the expression product of the CA gene. Again, having identified the importance of a gene in a particular state, screening for agents that bind and/or modulate the biological activity of the gene product can be run as is more fully outlined below.

[0220] In a preferred embodiment, screens are designed to first find candidate agents that can bind to CA proteins, and then these agents may be used in assays that evaluate the ability of the candidate agent to modulate the CAP activity and the cancer phenotype. Thus, as will be appreciated by those in the art, there are a number of different assays that may be run; binding assays and activity assays.

[0221] In a preferred embodiment, binding assays are done. In general, purified or isolated gene product is used; that is, the gene products of one or more CA nucleic acids are made. In general, this is done as is known in the art. For example, antibodies are generated to the protein gene products, and standard immunoassays are run to determine the amount of protein present. Alternatively, cells comprising the CA proteins can be used in the assays.

[0222] Thus, in a preferred embodiment, the methods comprise combining a CA protein and a candidate bioactive agent, and determining the binding of the candidate agent to the CA protein. Preferred embodiments utilize the human or mouse CA protein, although other mammalian proteins may also be used, for example for the development of animal models of human disease. In some embodiments, as outlined herein, variant or derivative CA proteins may be used.

[0223] Generally, in a preferred embodiment of the methods herein, the CA protein or the candidate agent is non-diffusably bound to an insoluble support having isolated sample receiving areas (e.g. a microtiter plate, an array, etc.). The insoluble support may be made of any composition to which the compositions can be bound, is readily separated from soluble material, and is otherwise compatible with the overall method of screening. The surface of such supports may be solid or porous and of any convenient shape. Examples of suitable insoluble supports include microtiter plates, arrays, membranes and beads. These are typically made of glass, plastic (e.g., polystyrene), polysaccharides, nylon or nitrocellulose, Teflon®, etc. Microtiter plates and arrays are especially convenient because a large number of assays can be carried out simultaneously, using small amounts of reagents and samples.

[0224] The particular manner of binding of the composition is not crucial so long as it is compatible with the reagents and overall methods of the invention, maintains the activity of the composition and is nondiffisable. Preferred methods of binding include the use of antibodies (which do not sterically block either the ligand binding site or activation sequence when the protein is bound to the support), direct binding to “sticky” or ionic supports, chemical crosslinking, the synthesis of the protein or agent on the surface, etc. Following binding of the protein or agent, excess unbound material is removed by washing. The sample receiving areas may then be blocked through incubation with bovine serum albumin (BSA), casein or other innocuous protein or other moiety.

[0225] In a preferred embodiment, the CA protein is bound to the support, and a candidate bioactive agent is added to the assay. Alternatively, the candidate agent is bound to the support and the CA protein is added. Novel binding agents include specific antibodies, non-natural binding agents identified in screens of chemical libraries, peptide analogs, etc. Of particular interest are screening assays for agents that have a low toxicity for human cells. A wide variety of assays may be used for this purpose, including labeled in vitro protein-protein binding assays, electrophoretic mobility shift assays, immunoassays for protein binding, functional assays (phosphorylation assays, etc.) and the like.

[0226] The determination of the binding of the candidate bioactive agent to the CA protein may be done in a number of ways. In a preferred embodiment, the candidate bioactive agent is labeled, and binding determined directly. For example, this may be done by attaching all or a portion of the CA protein to a solid support, adding a labeled candidate agent (for example a fluorescent label), washing off excess reagent, and determining whether the label is present on the solid support. Various blocking and washing steps may be utilized as is known in the art.

[0227] By “labeled” herein is meant that the compound is either directly or indirectly labeled with a label which provides a detectable signal, e.g. radioisotope, fluorescers, enzyme, antibodies, particles such as magnetic particles, chemiluminescers, or specific binding molecules, etc. Specific binding molecules include pairs, such as biotin and streptavidin, digoxin and antidigoxin etc. For the specific binding members, the complementary member would normally be labeled with a molecule which provides for detection, in accordance with known procedures, as outlined above. The label can directly or indirectly provide a detectable signal.

[0228] In some embodiments, only one of the components is labeled. For example, the proteins (or proteinaceous candidate agents) may be labeled at tyrosine positions using ¹²⁵I, or with fluorophores. Alternatively, more than one component may be labeled with different labels; using ¹²⁵I, for the proteins, for example, and a fluorophore for the candidate agents.

[0229] In a preferred embodiment, the binding of the candidate bioactive agent is determined through the use of competitive binding assays. In this embodiment, the competitor is a binding moiety known to bind to the target molecule (i.e. CA protein), such as an antibody, peptide, binding partner, ligand, etc. Under certain circumstances, there may be competitive binding as between the bioactive agent and the binding moiety, with the binding moiety displacing the bioactive agent.

[0230] In one embodiment, the candidate bioactive agent is labeled. Either the candidate bioactive agent, or the competitor, or both, is added first to the protein for a time sufficient to allow binding, if present. Incubations may be performed at any temperature which facilitates optimal activity, typically between 4 and 40° C. Incubation periods are selected for optimum activity, but may also be optimized to facilitate rapid high throughput screening. Typically between 0.1 and 1 hour will be sufficient. Excess reagent is generally removed or washed away. The second component is then added, and the presence or absence of the labeled component is followed, to indicate binding.

[0231] In a preferred embodiment, the competitor is added first, followed by the candidate bioactive agent. Displacement of the competitor is an indication that the candidate bioactive agent is binding to the CA protein and thus is capable of binding to, and potentially modulating, the activity of the CA protein. In this embodiment, either component can be labeled. Thus, for example, if the competitor is labeled, the presence of label in the wash solution indicates displacement by the agent. Alternatively, if the candidate bioactive agent is labeled, the presence of the label on the support indicates displacement.

[0232] In an alternative embodiment, the candidate bioactive agent is added first, with incubation and washing, followed by the competitor. The absence of binding by the competitor may indicate that the bioactive agent is bound to the CA protein with a higher affinity. Thus, if the candidate bioactive agent is labeled, the presence of the label on the support, coupled with a lack of competitor binding, may indicate that the candidate agent is capable of binding to the CA protein.

[0233] In a preferred embodiment, the methods comprise differential screening to identity bioactive agents that are capable of modulating the activity of the CA proteins. In this embodiment, the methods comprise combining a CA protein and a competitor in a first sample. A second sample comprises a candidate bioactive agent, a CA protein and a competitor. The binding of the competitor is determined for both samples, and a change, or difference in binding between the two samples indicates the presence of an agent capable of binding to the CA protein and potentially modulating its activity. That is, if the binding of the competitor is different in the second sample relative to the first sample, the agent is capable of binding to the CA protein.

[0234] Alternatively, a preferred embodiment utilizes differential screening to identify drug candidates that bind to the native CA protein, but cannot bind to modified CA proteins. The structure of the CA protein may be modeled, and used in rational drug design to synthesize agents that interact with that site. Drug candidates that affect CA bioactivity are also identified by screening drugs for the ability to either enhance or reduce the activity of the protein.

[0235] Positive controls and negative controls may be used in the assays. Preferably all control and test samples are performed in at least triplicate to obtain statistically significant results. Incubation of all samples is for a time sufficient for the binding of the agent to the protein. Following incubation, all samples are washed free of non-specifically bound material and the amount of bound, generally labeled agent determined. For example, where a radiolabel is employed, the samples may be counted in a scintillation counter to determine the amount of bound compound.

[0236] A variety of other reagents may be included in the screening assays. These include reagents like salts, neutral proteins, e.g. albumin, detergents, etc which may be used to facilitate optimal protein-protein binding and/or reduce non-specific or background interactions. Also reagents that otherwise improve the efficiency of the assay, such as protease inhibitors, nuclease inhibitors, anti-microbial agents, etc., may be used. The mixture of components may be added in any order that provides for the requisite binding.

[0237] Screening for agents that modulate the activity of CA proteins may also be done. In a preferred embodiment, methods for screening for a bioactive agent capable of modulating the activity of CA proteins comprise the steps of adding a candidate bioactive agent to a sample of CA proteins, as above, and determining an alteration in the biological activity of CA proteins. “Modulating the activity of a CA protein” includes an increase in activity, a decrease in activity, or a change in the type or kind of activity present. Thus, in this embodiment, the candidate agent should both bind to CA proteins (although this may not be necessary), and alter its biological or biochemical activity as defined herein. The methods include both in vitro screening methods, as are generally outlined above, and in vivo screening of cells for alterations in the presence, distribution, activity or amount of CA proteins.

[0238] Thus, in this embodiment, the methods comprise combining a CA sample and a candidate bioactive agent, and evaluating the effect on CA activity. By “CA activity” or grammatical equivalents herein is meant one of the CA protein's biological activities, including, but not limited to, its role in tumorigenesis, including cell division, preferably in lymphatic tissue, cell proliferation, tumor growth and transformation of cells. In one embodiment, CA activity includes activation of or by a protein encoded by a nucleic acid of Tables 1-10. An inhibitor of CA activity is the inhibition of any one or more CA activities.

[0239] In a preferred embodiment, the activity of the CA protein is increased; in another preferred embodiment, the activity of the CA protein is decreased. Thus, bioactive agents that are antagonists are preferred in some embodiments, and bioactive agents that are agonists may be preferred in other embodiments.

[0240] In a preferred embodiment, the invention provides methods for screening for bioactive agents capable of modulating the activity of a CA protein. The methods comprise adding a candidate bioactive agent, as defined above, to a cell comprising CA proteins. Preferred cell types include almost any cell. The cells contain a recombinant nucleic acid that encodes a CA protein. In a preferred embodiment, a library of candidate agents is tested on a plurality of cells.

[0241] In one aspect, the assays are evaluated in the presence or absence or previous or subsequent exposure of physiological signals, for example hormones, antibodies, peptides, antigens, cytokines, growth factors, action potentials, pharmacological agents including chemotherapeutics, radiation, carcinogenics, or other cells (i.e. cell-cell contacts). In another example, the determinations are determined at different stages of the cell cycle process.

[0242] In this way, bioactive agents are identified. Compounds with pharmacological activity are able to enhance or interfere with the activity of the CA protein.

Applications of the Invention

[0243] In one embodiment, a method of inhibiting cancer cell division is provided. In another embodiment, a method of inhibiting tumor growth is provided. In a further embodiment, methods of treating cells or individuals with cancer are provided.

[0244] The method comprises administration of a cancer inhibitor. In particular embodiments, the cancer inhibitor is an antisense molecule, a pharmaceutical composition, a therapeutic agent or small molecule, or a monoclonal, polyclonal, chimeric or humanized antibody. In particular embodiments, a therapeutic agent is coupled with a an antibody, preferable a monoclonal antobody.

[0245] In other embodiments, methods for detection or diagnosis of cancer cells in an individual are provided. In particular embodiments, the diagnostic/detection agent is a small molecule that pereferentially binds to a CAP according to the invention. In one embodiment, the diagnostic/detection agent is an antibody, preferably a monoclonal antobody, preferably linked to a detectable agent.

[0246] In other embodiments of the invention, animal models and transgenic animals are provided, which find use in generating animal models of cancers, particularly lymphomas and carcinomas.

(a) Antisense Molecules

[0247] In one embodiment, the cancer inhibitor is an antisense molecule. Antisense molecules as used herein include antisense or sense oligonucleotides comprising a single-stranded nucleic acid sequence (either RNA or DNA) capable of binding to target mRNA (sense) or DNA (antisense) sequences for cancer molecules. Antisense or sense oligonucleotides, according to the present invention, comprise a fragment generally at least about 14 nucleotides, preferably from about 14 to 30 nucleotides. The ability to derive an antisense or a sense oligonucleotide, based upon a cDNA sequence encoding a given protein is described in, for example, Stein and Cohen, Cancer Res. 48:2659, (1988) and van der Krol et al., BioTechniques 6:958, (1988).

[0248] Antisense molecules can be modified or unmodified RNA, DNA, or mixed polymer oligonucleotides. These molecules function by specifically binding to matching sequences resulting in inhibition of peptide synthesis (Wu-Pong, Nov 1994, BioPharm, 20-33) either by steric blocking or by activating an RNase H enzyme. Antisense molecules can also alter protein synthesis by interfering with RNA processing or transport from the nucleus into the cytoplasm (Mukhopadhyay & Roth, 1996, Crit. Rev. in Oncogenesis 7, 151-190). In addition, binding of single stranded DNA to RNA can result in nuclease-mediated degradation of the heteroduplex (Wu-Pong, supra). Backbone modified DNA chemistry which have thus far been shown to act as substrates for RNase H are phosphorothioates, phosphorodithioates, borontrifluoridates, and 2′-arabino and 2′-fluoro arabino-containing oligonucleotides.

[0249] Antisense molecules may be introduced into a cell containing the target nucleotide sequence by formation of a conjugate with a ligand binding molecule, as described in WO 91/04753. Suitable ligand binding molecules include, but are not limited to, cell surface receptors, growth factors, other cytokines, or other ligands that bind to cell surface receptors. Preferably, conjugation of the ligand binding molecule does not substantially interfere with the ability of the ligand binding molecule to bind to its corresponding molecule or receptor, or block entry of the sense or antisense oligonucleotide or its conjugated version into the cell. Alternatively, a sense or an antisense oligonucleotide may be introduced into a cell containing the target nucleic acid sequence by formation of an oligonucleotide-lipid complex, as described in WO 90/10448. It is understood that the use of antisense molecules or knock out and knock in models may also be used in screening assays as discussed above, in addition to methods of treatment.

(b) RNA Interference

[0250] RNA interference refers to the process of sequence-specific post transcriptional gene silencing in animals mediated by short interfering RNAs (siRNA) (Fire et al., Nature, 391, 806 (1998)). The corresponding process in plants is referred to as post transcriptional gene silencing or RNA silencing and is also referred to as quelling in fungi. The presence of dsRNA in cells triggers the RNAi response though a mechanism that has yet to be fully characterized. This mechanism appears to be different from the interferon response that results from dsRNA mediated activation of protein kinase PKR and 2′,5′-oligoadenylate synthetase resulting in non-specific cleavage of mRNA by ribonuclease L. (reviewed in Sharp, P. A., RNA interference—2001, Genes & Development 15:485-490 (2001)).

[0251] Small interfering RNAs (siRNAs) are powerful sequence-specific reagents designed to suppress the expression of genes in cultured mammalian cells through a process known as RNA interference (RNAi). Elbashir, S. M. et al. Nature 411:494-498 (2001); Caplen, N. J. et al. Proc. Natl. Acad. Sci. USA 98:9742-9747 (2001); Harborth, J. et al. J Cell Sci. 114:4557-4565 (2001). The term “short interfering RNA” or “siRNA” refers to a double stranded nucleic acid molecule capable of RNA interference “RNAi”, (see Kreutzer et al., WO 00/44895; Zemicka-Goetz et al. WO 01/36646; Fire, WO 99/32619; Mello and Fire, WO 01/29058). As used herein, siRNA molecules are limited to RNA molecules but further encompasses chemically modified nucleotides and non-nucleotides. siRNA gene-targeting experiments have been carried out by transient siRNA transfer into cells (achieved by such classic methods as liposome-mediated transfection, electroporation, or microinjection).

[0252] Molecules of siRNA are 21- to 23-nucleotide RNAs, with characteristic 2- to 3-nucleotide 3′-overhanging ends resembling the RNase III processing products of long double-stranded RNAs (dsRNAs) that normally initiate RNAi. When introduced into a cell, they assemble with yet-to-be-identified proteins of an endonuclease complex (RNA-induced silencing complex), which then guides target mRNA cleavage. As a consequence of degradation of the targeted mRNA, cells with a specific phenotype characteristic of suppression of the corresponding protein product are obtained. The small size of siRNAs, compared with traditional antisense molecules, prevents activation of the dsRNA-inducible interferon system present in mammalian cells. This avoids the nonspecific phenotypes normally produced by dsRNA larger than 30 base pairs in somatic cells.

[0253] Intracellular transcription of small RNA molecules is achieved by cloning the siRNA templates into RNA polymerase III (Pol III) transcription units, which normally encode the small nuclear RNA (snRNA) U6 or the human RNase P RNA H1. Two approaches have been developed for expressing siRNAs: in the first, sense and antisense strands constituting the siRNA duplex are transcribed by individual promoters (Lee, N. S. et al. Nat. Biotechnol. 20, 500-505 (2002).Miyagishi, M. & Taira, K. Nat. Biotechnol. 20, 497-500 (2002).); in the second, siRNAs are expressed as fold-back stem-loop structures that give rise to siRNAs after intracellular processing (Paul, C. P. et al. Nat. Biotechnol. 20:505-508 (2002)). The endogenous expression of siRNAs from introduced DNA templates is thought to overcome some limitations of exogenous siRNA delivery, in particular the transient loss of phenotype. U6 and H1 RNA promoters are members of the type III class of Pol III promoters. (Paule, M. R. & White, R. J. Nucleic Acids Res. 28, 1283-1298 (2000)).

[0254] Co-expression of sense and antisense siRNAs mediate silencing of target genes, whereas expression of sense or antisense siRNA alone do not greatly affect target gene expression. Transfection of plasmid DNA, rather than synthetic siRNAs, may appear advantageous, considering the danger of RNase contamination and the costs of chemically synthesized siRNAs or siRNA transcription kits. Stable expression of siRNAs allows new gene therapy applications, such as treatment of persistent viral infections. Considering the high specificity of siRNAs, the approach also allows the targeting of disease-derived transcripts with point mutations, such as RAS or TP53 oncogene transcripts, without alteration of the remaining wild-type allele. Finally, by high-throughput sequence analysis of the various genomes, the DNA-based methodology may also be a cost-effective alternative for automated genome-wide loss-of-function phenotypic analysis, especially when combined with miniaturized array-based phenotypic screens. (Ziauddin, J. & Sabatini, D. M. Nature 411:107-110 (2001)).

[0255] The presence of long dsRNAs in cells stimulates the activity of a ribonuclease III enzyme referred to as dicer. Dicer is involved in the processing of the dsRNA into short pieces of dsRNA known as short interfering RNAs (siRNA) (Berstein et al., 2001, Nature, 409:363 (2001)). Short interfering RNAs derived from dicer activity are typically about 21-23 nucleotides in length and comprise about 19 base pair duplexes. Dicer has also been implicated in the excision of 21 and 22 nucleotide small temporal RNAs (stRNA) from precursor RNA of conserved structure that are implicated in translational control (Hutvagner et al., Science, 293, 834 (2001)). The RNAi response also features an endonuclease complex containing a siRNA, commonly referred to as an RNA-induced silencing complex (RISC), which mediates cleavage of single stranded RNA having sequence homologous to the siRNA. Cleavage of the target RNA takes place in the middle of the region complementary to the guide sequence of the siRNA duplex (Elbashir et al., Genes Dev., 15, 188 (2001)).

[0256] This invention provides an expression system comprising an isolated nucleic acid molecule comprising a sequence capable of specifically hybridizing to the CA sequences. In an embodiment, the nucleic acid molecule is capable of inhibiting the expression of the CA protein. A method of inhibiting expression of CA inside a cell by a vector-directed expression of a short RNA which short RNA can fold in itself and create a double strand RNA having CA mRNA sequence identity and able to trigger posttranscriptional gene silencing, or RNA interference (RNAi), of the CA gene inside the cell. In another method a short double strand RNA having CA mRNA sequence identity is delivered inside the cell to trigger posttranscriptional gene silencing, or RNAi, of the CA gene. In various embodiments, the nucleic acid molecule is at least a 7 mer, at least a 10 mer, or at least a 20 mer. In a further embodiment, the sequence is unique.

(c) Pharmaceutical Compositions

[0257] Pharmaceutical compositions encompassed by the present invention include as active agent, the polypeptides, polynucleotides, antisense oligonucleotides, or antibodies of the invention disclosed herein in a therapeutically effective amount. An “effective amount” is an amount sufficient to effect beneficial or desired results, including clinical results. An effective amount can be administered in one or more administrations. For purposes of this invention, an effective amount of an adenoviral vector is an amount that is sufficient to palliate, ameliorate, stabilize, reverse, slow or delay the progression of the disease state.

[0258] The compositions can be used to treat cancer as well as metastases of primary cancer. In addition, the pharmaceutical compositions can be used in conjunction with conventional methods of cancer treatment, e.g., to sensitize tumors to radiation or conventional chemotherapy. The terms “treatment”, “treating”, “treat” and the like are used herein to generally refer to obtaining a desired pharmacologic and/or physiologic effect. The effect may be prophylactic in terms of completely or partially preventing a disease or symptom thereof and/or may be therapeutic in terms of a partial or complete stabilization or cure for a disease and/or adverse effect attributable to the disease. “Treatment” as used herein covers any treatment of a disease in a mammal, particularly a human, and includes: (a) preventing the disease or symptom from occurring in a subject which may be predisposed to the disease or symptom but has not yet been diagnosed as having it; (b) inhibiting the disease symptom, i.e., arresting its development; or (c) relieving the disease symptom, i.e., causing regression of the disease or symptom.

[0259] Where the pharmaceutical composition comprises an antibody that specifically binds to a gene product encoded by a differentially expressed polynucleotide, the antibody can be coupled to a drug for delivery to a treatment site or coupled to a detectable label to facilitate imaging of a site comprising cancer cells, such as prostate cancer cells. Methods for coupling antibodies to drugs and detectable labels are well known in the art, as are methods for imaging using detectable labels.

[0260] A “patient” for the purposes of the present invention includes both humans and other animals, particularly mammals, and organisms. Thus the methods are applicable to both human therapy and veterinary applications. In the preferred embodiment the patient is a mammal, and in the most preferred embodiment the patient is human.

[0261] The term “therapeutically effective amount” as used herein refers to an amount of a therapeutic agent to treat, ameliorate, or prevent a desired disease or condition, or to exhibit a detectable therapeutic or preventative effect. The effect can be detected by, for example, chemical markers or antigen levels. Therapeutic effects also include reduction in physical symptoms, such as decreased body temperature. The precise effective amount for a subject will depend upon the subject's size and health, the nature and extent of the condition, and the therapeutics or combination of therapeutics selected for administration. The effective amount for a given situation is determined by routine experimentation and is within the judgment of the clinician. For purposes of the present invention, an effective dose will generally be from about 0.01 mg/kg to about 5 mg/kg, or about 0.01 mg/kg to about 50 mg/kg or about 0.05 mg/kg to about 10 mg/kg of the compositions of the present invention in the individual to which it is administered.

[0262] A pharmaceutical composition can also contain a pharmaceutically acceptable carrier. The term “pharmaceutically acceptable carrier” refers to a carrier for administration of a therapeutic agent, such as antibodies or a polypeptide, genes, and other therapeutic agents. The term refers to any pharmaceutical carrier that does not itself induce the production of antibodies harmful to the individual receiving the composition, and which can be administered without undue toxicity. Suitable carriers can be large, slowly metabolized macromolecules such as proteins, polysaccharides, polylactic acids, polyglycolic acids, polymeric amino acids, amino acid copolymers, and inactive virus particles. Such carriers are well known to those of ordinary skill in the art. Pharmaceutically acceptable carriers in therapeutic compositions can include liquids such as water, saline, glycerol and ethanol. Auxiliary substances, such as wetting or emulsifying agents, pH buffering substances, and the like, can also be present in such vehicles. Typically, the therapeutic compositions are prepared as injectables, either as liquid solutions or suspensions; solid forms suitable for solution in, or suspension in, liquid vehicles prior to injection can also be prepared. Liposomes are included within the definition of a pharmaceutically acceptable carrier. Pharmaceutically acceptable salts can also be present in the pharmaceutical composition, e.g., mineral acid salts such as hydrochlorides, hydrobromides, phosphates, sulfates, and the like; and the salts of organic acids such as acetates, propionates, malonates, benzoates, and the like. A thorough discussion of pharmaceutically acceptable excipients is available in Remington: The Science and Practice of Pharmacy (1995) Alfonso Gennaro, Lippincott, Williams, & Wilkins.

[0263] The pharmaceutical compositions can be prepared in various forms, such as granules, tablets, pills, suppositories, capsules, suspensions, salves, lotions and the like. Pharmaceutical grade organic or inorganic carriers and/or diluents suitable for oral and topical use can be used to make up compositions containing the therapeutically-active compounds. Diluents known to the art include aqueous media, vegetable and animal oils and fats. Stabilizing agents, wetting and emulsifying agents, salts for varying the osmotic pressure or buffers for securing an adequate pH value, and skin penetration enhancers can be used as auxiliary agents.

[0264] The pharmaceutical compositions of the present invention comprise a CA protein in a form suitable for administration to a patient. In the preferred embodiment, the pharmaceutical compositions are in a water soluble form, such as being present as pharmaceutically acceptable salts, which is meant to include both acid and base addition salts. “Pharmaceutically acceptable acid addition salt” refers to those salts that retain the biological effectiveness of the free bases and that are not biologically or otherwise undesirable, formed with inorganic acids such as hydrochloric acid, hydrobromic acid, sulfuric acid, nitric acid, phosphoric acid and the like, and organic acids such as acetic acid, propionic acid, glycolic acid, pyruvic acid, oxalic acid, maleic acid, malonic acid, succinic acid, fumaric acid, tartaric acid, citric acid, benzoic acid, cinnamic acid, mandelic acid, methanesulfonic acid, ethanesulfonic acid, p-toluenesulfonic acid, salicylic acid and the like. “Pharmaceutically acceptable base addition salts” include those derived from inorganic bases such as sodium, potassium, lithium, ammonium, calcium, magnesium, iron, zinc, copper, manganese, aluminum salts and the like. Particularly preferred are the ammonium, potassium, sodium, calcium, and magnesium salts. Salts derived from pharmaceutically acceptable organic non-toxic bases include salts of primary, secondary, and tertiary amines, substituted amines including naturally occurring substituted amines, cyclic amines and basic ion exchange resins, such as isopropylamine, trimethylamine, diethylamine, triethylamine, tripropylamine, and ethanolamine.

[0265] The pharmaceutical compositions may also include one or more of the following: carrier proteins such as serum albumin; buffers; fillers such as microcrystalline cellulose, lactose, corn and other starches; binding agents; sweeteners and other flavoring agents; coloring agents; and polyethylene glycol. Additives are well known in the art, and are used in a variety of formulations.

[0266] The compounds having the desired pharmacological activity may be administered in a physiologically acceptable carrier to a host, as previously described. The agents may be administered in a variety of ways, orally, parenterally e.g., subcutaneously, intraperitoneally, intravascularly, etc. Depending upon the manner of introduction, the compounds may be formulated in a variety of ways. The concentration of therapeutically active compound in the formulation may vary from about 0.1-100% wgt/vol. Once formulated, the compositions contemplated by the invention can be (1) administered directly to the subject (e.g., as polynucleotide, polypeptides, small molecule agonists or antagonists, and the like); or (2) delivered ex vivo, to cells derived from the subject (e.g., as in ex vivo gene therapy). Direct delivery of the compositions will generally be accomplished by parenteral injection, e.g., subcutaneously, intraperitoneally, intravenously or intramuscularly, intratumoral or to the interstitial space of a tissue. Other modes of administration include oral and pulmonary administration, suppositories, and transdermal applications, needles, and gene guns or hyposprays. Dosage treatment can be a single dose schedule or a multiple dose schedule.

[0267] Methods for the ex vivo delivery and reimplantation of transformed cells into a subject are known in the art and described in e.g., International Publication No. WO 93/14778. Examples of cells useful in ex vivo applications include, for example, stem cells, particularly hematopoetic, lymph cells, macrophages, dendritic cells, or tumor cells. Generally, delivery of nucleic acids for both ex vivo and in vitro applications can be accomplished by, for example, dextran-mediated transfection, calcium phosphate precipitation, polybrene mediated transfection, protoplast fusion, electroporation, encapsulation of the polynucleotide(s) in liposomes, and direct microinjection of the DNA into nuclei, all well known in the art.

[0268] Once differential expression of a gene corresponding to a CA polynucleotide described herein has been found to correlate with a proliferative disorder, such as neoplasia, dysplasia, and hyperplasia, the disorder can be amenable to treatment by administration of a therapeutic agent based on the provided polynucleotide, corresponding polypeptide or other corresponding molecule (e.g., antisense, ribozyme, etc.). In other embodiments, the disorder can be amenable to treatment by administration of a small molecule drug that, for example, serves as an inhibitor (antagonist) of the function of the encoded gene product of a gene having increased expression in cancerous cells relative to normal cells or as an agonist for gene products that are decreased in expression in cancerous cells (e.g., to promote the activity of gene products that act as tumor suppressors).

[0269] The dose and the means of administration of the inventive pharmaceutical compositions are determined based on the specific qualities of the therapeutic composition, the condition, age, and weight of the patient, the progression of the disease, and other relevant factors. For example, administration of polynucleotide therapeutic compositions agents includes local or systemic administration, including injection, oral administration, particle gun or catheterized administration, and topical administration. Preferably, the therapeutic polynucleotide composition contains an expression construct comprising a promoter operably linked to a polynucleotide of at least 12, 22, 25, 30, or 35 contiguous nt of the polynucleotide disclosed herein. Various methods can be used to administer the therapeutic composition directly to a specific site in the body. For example, a small metastatic lesion is located and the therapeutic composition injected several times in several different locations within the body of tumor. Alternatively, arteries that serve a tumor are identified, and the therapeutic composition injected into such an artery, in order to deliver the composition directly into the tumor. A tumor that has a necrotic center is aspirated and the composition injected directly into the now empty center of the tumor. An antisense composition is directly administered to the surface of the tumor, for example, by topical application of the composition. X-ray imaging is used to assist in certain of the above delivery methods.

[0270] Targeted delivery of therapeutic compositions containing an antisense polynucleotide, subgenomic polynucleotides, or antibodies to specific tissues can also be used. Receptor-mediated DNA delivery techniques are described in, for example, Findeis et al., Trends Biotechnol. (1993) 11:202; Chiou et al., Gene Therapeutics: Methods And Applications Of Direct Gene Transfer (J. A. Wolff, ed.) (1994); Wu et al., J. Biol. Chem. (1988) 263:621; Wu et al., J. Biol. Chem. (1994) 269:542; Zenke et al., Proc. Natl. Acad. Sci. (USA) (1990) 87:3655; Wu et al., J. Biol. Chem. (1991) 266:338. Therapeutic compositions containing a polynucleotide are administered in. a range of about 100 ng to about 200 mg of DNA for local administration in a gene therapy protocol. Concentration ranges of about 500 ng to about 50 mg, about 1 μg to about 2 mg, about 5 μg to about 500 μg, and about 20 μg to about 100 μg of DNA can also be used during a gene therapy protocol. Factors such as method of action (e.g., for enhancing or inhibiting levels of the encoded gene product) and efficacy of transformation and expression are considerations that will affect the dosage required for ultimate efficacy of the antisense subgenomic polynucleotides. Where greater expression is desired over a larger area of tissue, larger amounts of antisense subgenomic polynucleotides or the same amounts re-administered in a successive protocol of administrations, or several administrations to different adjacent or close tissue portions of, for example, a tumor site, may be required to effect a positive therapeutic outcome. In all cases, routine experimentation in clinical trials will determine specific ranges for optimal therapeutic effect.

[0271] The therapeutic polynucleotides and polypeptides of the present invention can be delivered using gene delivery vehicles. The gene delivery vehicle can be of viral or non-viral origin (see generally, Jolly, Cancer Gene Therapy (1994) 1:51; Kimura, Human Gene Therapy (1994) 5:845; Connelly, Human Gene Therapy (1995) 1:185; and Kaplitt, Nature Genetics (1994) 6:148). Expression of such coding sequences can be induced using endogenous mammalian or heterologous promoters. Expression of the coding sequence can be either constitutive or regulated.

[0272] Viral-based vectors for delivery of a desired polynucleotide and expression in a desired cell are well known in the art. Exemplary viral-based vehicles include, but are not limited to, recombinant retroviruses (see, e.g., WO 90/07936; WO 94/03622; WO 93/25698; WO 93/25234; U.S. Pat. No. 5, 219,740; WO 93/11230; WO 93/10218; U.S. Pat. No. 4,777,127; GB Patent No. 2,200,651; EP 0 345 242; and WO 91/02805), alphavirus-based vectors (e.g., Sindbis virus vectors, Semliki forest virus (ATCC VR-67; ATCC VR-1247), Ross River virus (ATCC VR-373; ATCC VR-1246) and Venezuelan equine encephalitis virus (ATCC VR-923; ATCC VR-1250; ATCC VR 1249; ATCC VR-532)), and adeno-associated virus (AAV) vectors (see, e.g., WO 94/12649, WO 93/03769; WO 93/19191; WO 94/28938; WO 95/11984 and WO 95/00655). Administration of DNA linked to killed adenovirus as described in Curiel, Hum. Gene Ther. (1992) 3:147 can also be employed.

[0273] Non-viral delivery vehicles and methods can also be employed, including, but not limited to, polycationic condensed DNA linked or unlinked to killed adenovirus alone (see, e.g., Curiel, Hum. Gene Ther. (1992) 3:147); ligand-linked DNA (see, e.g., Wu, J. Biol. Chem. (1989) 264:16985); eukaryotic cell delivery vehicles cells (see, e.g., U.S. Pat. No. 5,814,482; WO 95/07994; WO 96/17072; WO 95/30763; and WO 97/42338) and nucleic charge neutralization or fusion with cell membranes. Naked DNA can also be employed. Exemplary naked DNA introduction methods are described in WO 90/11092 and U.S. Pat. No. 5,580,859. Liposomes that can act as gene delivery vehicles are described in U.S. Pat. No. 5,422,120; WO 95/13796; WO 94/23697; WO 91/14445; and EP 0524968. Additional approaches are described in Philip, Mol. Cell Biol. (1994) 14:2411, and in Woffendin, Proc. Natl. Acad. Sci. (1994) 91:1581.

[0274] Further non-viral delivery suitable for use includes mechanical delivery systems such as the approach described in Woffendin et al., Proc. Natl. Acad. Sci. USA (1994) 91(24):11581. Moreover, the coding sequence and the product of expression of such can be delivered through deposition of photopolymerized hydrogel materials or use of ionizing radiation (see, e.g., U.S. Pat. No. 5,206,152 and WO 92/11033). Other conventional methods for gene delivery that can be used for delivery of the coding sequence include, for example, use of hand-held gene transfer particle gun (see, e.g., U.S. Pat. No. 5,149,655); use of ionizing radiation for activating transferred gene (see, e.g., U.S. Pat. No. 5,206,152 and WO 92/11033).

[0275] The administration of the CA proteins and modulators of the present invention can be done in a variety of ways as discussed above, including, but not limited to, orally, subcutaneously, intravenously, intranasally, transdermally, intraperitoneally, intramuscularly, intrapulmonary, vaginally, rectally, or intraocularly. In some instances, for example, in the treatment of wounds and inflammation, the CA proteins and modulators may be directly applied as a solution or spray.

[0276] In a preferred embodiment, CA proteins and modulators are administered as therapeutic agents, and can be formulated as outlined above. Similarly, CA genes (including both the full-length sequence, partial sequences, or regulatory sequences of the CA coding regions) can be administered in gene therapy applications, as is known in the art. These CA genes can include antisense applications, either as gene therapy (i.e. for incorporation into the genome) or as antisense compositions, as will be appreciated by those in the art.

[0277] Thus, in one embodiment, methods of modulating CA gene activity in cells or organisms are provided. In one embodiment, the methods comprise administering to a cell an anti-CA antibody that reduces or eliminates the biological activity of an endogenous CA protein. Alternatively, the methods comprise administering to a cell or organism a recombinant nucleic acid encoding a CA protein. As will be appreciated by those in the art, this may be accomplished in any number of ways. In a preferred embodiment, for example when the CA sequence is down-regulated in cancer, the activity of the CA gene product is increased by increasing the amount of CA expression in the cell, for example by overexpressing the endogenous CA gene or by administering a gene encoding the CA sequence, using known gene-therapy techniques. In a preferred embodiment, the gene therapy techniques include the incorporation of the exogenous gene using enhanced homologous recombination (EHR), for example as described in PCT/US93/03868, hereby incorporated by reference in its entirety. Alternatively, for example when the CA sequence is up-regulated in cancer, the activity of the endogenous CA gene is decreased, for example by the administration of a CA antisense nucleic acid.

(d) Vaccines

[0278] In a preferred embodiment, CA genes are administered as DNA vaccines, either single genes or combinations of CA genes. Naked DNA vaccines are generally known in the art. Brower, Nature Biotechnology, 16:1304-1305 (1998).

[0279] In one embodiment, CA genes of the present invention are used as DNA vaccines. Methods for the use of genes as DNA vaccines are well known to one of ordinary skill in the art, and include placing a CA gene or portion of a CA gene under the control of a promoter for expression in a patient with cancer. The CA gene used for DNA vaccines can encode full-length CA proteins, but more preferably encodes portions of the CA proteins including peptides derived from the CA protein. In a preferred embodiment a patient is immunized with a DNA vaccine comprising a plurality of nucleotide sequences derived from a CA gene. Similarly, it is possible to immunize a patient with a plurality of CA genes or portions thereof. Without being bound by theory, expression of the polypeptide encoded by the DNA vaccine, cytotoxic T-cells, helper T-cells and antibodies are induced that recognize and destroy or eliminate cells expressing CA proteins.

[0280] In a preferred embodiment, the DNA vaccines include a gene encoding an adjuvant molecule with the DNA vaccine. Such adjuvant molecules include cytokines that increase the immunogenic response to the CA polypeptide encoded by the DNA vaccine. Additional or alternative adjuvants are known to those of ordinary skill in the art and find use in the invention.

(e) Antibodies

[0281] In one embodiment, a cancer inhibitor is an antibody as discussed above. In one embodiment, the CA proteins of the present invention may be used to generate polyclonal and monoclonal antibodies to CA proteins, which are useful as described herein. Similarly, the CA proteins can be coupled, using standard technology, to affinity chromatography columns. These columns may then be used to purify CA antibodies. In a preferred embodiment, the antibodies are generated to epitopes unique to a CA protein; that is, the antibodies show little or no cross-reactivity to other proteins. These antibodies find use in a number of applications. For example, the CA antibodies may be coupled to standard affinity chromatography columns and used to purify CA proteins. The antibodies may also be used therapeutically as blocking polypeptides, as outlined above, since they will specifically bind to the CA protein.

[0282] The present invention further provides methods for detecting the presence of and/or measuring a level of a polypeptide in a biological sample, which CA polypeptide is encoded by a CA polynucleotide that is differentially expressed in a cancer cell, using an antibody specific for the encoded polypeptide. The methods generally comprise: a) contacting the sample with an antibody specific for a polypeptide encoded by a CA polynucleotide that is differentially expressed in a prostate cancer cell; and b) detecting binding between the antibody and molecules of the sample.

[0283] Detection of specific binding of the antibody specific for the encoded cancer-associated polypeptide, when compared to a suitable control is an indication that encoded polypeptide is present in the sample. Suitable controls include a sample known not to contain the encoded CA polypeptide or known not to contain elevated levels of the polypeptide; such as normal tissue, and a sample contacted with an antibody not specific for the encoded polypeptide, e.g., an anti-idiotype antibody. A variety of methods to detect specific antibody-antigen interactions are known in the art and can be used in the method, including, but not limited to, standard immunohistological methods, immunoprecipitation, an enzyme immunoassay, and a radioimmunoassay. In general, the specific antibody will be detectably labeled, either directly or indirectly. Direct labels include radioisotopes; enzymes whose products are detectable (e.g., luciferase, β-galactosidase, and the like); fluorescent labels (e.g., fluorescein isothiocyanate, rhodamine, phycoerythrin, and the like); fluorescence emitting metals, e.g., ¹⁵²Eu, or others of the lanthanide series, attached to the antibody through metal chelating groups such as EDTA; chemiluminescent compounds, e.g., luminol, isoluminol, acridinium salts, and the like; bioluminescent compounds, e.g., luciferin, aequorin (green fluorescent protein), and the like. The antibody may be attached (coupled) to an insoluble support, such as a polystyrene plate or a bead. Indirect labels include second antibodies specific for antibodies specific for the encoded polypeptide (“first specific antibody”), wherein the second antibody is labeled as described above; and members of specific binding pairs, e.g., biotin-avidin, and the like. The biological sample may be brought into contact with and immobilized on a solid support or carrier, such as nitrocellulose, that is capable of immobilizing cells, cell particles, or soluble proteins. The support may then be washed with suitable buffers, followed by contacting with a detectably-labeled first specific antibody. Detection methods are known in the art and will be chosen as appropriate to the signal emitted by the detectable label. Detection is generally accomplished in comparison to suitable controls, and to appropriate standards.

[0284] In some embodiments, the methods are adapted for use in vivo, e.g., to locate or identify sites where cancer cells are present. In these embodiments, a detectably-labeled moiety, e.g., an antibody, which is specific for a cancer-associated polypeptide is administered to an individual (e.g., by injection), and labeled cells are located using standard imaging techniques, including, but not limited to, magnetic resonance imaging, computed tomography scanning, and the like. In this manner, cancer cells are differentially labeled.

(f) Detection and Diagnosis of Cancers

[0285] Without being bound by theory, it appears that the various CA sequences are important in cancers. Accordingly, disorders based on mutant or variant CA genes may be determined. In one embodiment, the invention provides methods for identifying cells containing variant CA genes comprising determining all or part of the sequence of at least one endogenous CA genes in a cell. As will be appreciated by those in the art, this may be done using any number of sequencing techniques. In a preferred embodiment, the invention provides methods of identifying the CA genotype of an individual comprising determining all or part of the sequence of at least one CA gene of the individual. This is generally done in at least one tissue of the individual, and may include the evaluation of a number of tissues or different samples of the same tissue. The method may include comparing the sequence of the sequenced CA gene to a known CA gene, i.e., a wild-type gene. As will be appreciated by those in the art, alterations in the sequence of some CA genes can be an indication of either the presence of the disease, or propensity to develop the disease, or prognosis evaluations.

[0286] The sequence of all or part of the CA gene can then be compared to the sequence of a known CA gene to determine if any differences exist. This can be done using any number of known homology programs, such as Bestfit, etc. In a preferred embodiment, the presence of a difference in the sequence between the CA gene of the patient and the known CA gene is indicative of a disease state or a propensity for a disease state, as outlined herein.

[0287] In a preferred embodiment, the CA genes are used as probes to determine the number of copies of the CA gene in the genome. For example, some cancers exhibit chromosomal deletions or insertions, resulting in an alteration in the copy number of a gene.

[0288] In another preferred embodiment CA genes are used as probes to determine the chromosomal location of the CA genes. Information such as chromosomal location finds use in providing a diagnosis or prognosis in particular when chromosomal abnormalities such as translocations, and the like are identified in CA gene loci.

[0289] The present invention provides methods of using the polynucleotides described herein for detecting cancer cells, facilitating diagnosis of cancer and the severity of a cancer (e.g., tumor grade, tumor burden, and the like) in a subject, facilitating a determination of the prognosis of a subject, and assessing the responsiveness of the subject to therapy (e.g., by providing a measure of therapeutic effect through, for example, assessing tumor burden during or following a chemotherapeutic regimen). Detection can be based on detection of a polynucleotide that is differentially expressed in a cancer cell, and/or detection of a polypeptide encoded by a polynucleotide that is differentially expressed in a cancer cell. The detection methods of the invention can be conducted in vitro or in vivo, on isolated cells, or in whole tissues or a bodily fluid e.g., blood, plasma, serum, urine, and the like).

[0290] In some embodiments, methods are provided for detecting a cancer cell by detecting expression in the cell of a transcript that is differentially expressed in a cancer cell. Any of a variety of known methods can be used for detection, including, but not limited to, detection of a transcript by hybridization with a polynucleotide that hybridizes to a polynucleotide that is differentially expressed in a prostate cancer cell; detection of a transcript by a polymerase chain reaction using specific oligonucleotide primers; in situ hybridization of a cell using as a probe a polynucleotide that hybridizes to a gene that is differentially expressed in a prostate cancer cell. The methods can be used to detect and/or measure mRNA levels of a gene that is differentially expressed in a cancer cell. In some embodiments, the methods comprise: a) contacting a sample with a polynucleotide that corresponds to a differentially expressed gene described herein under conditions that allow hybridization; and b) detecting hybridization, if any.

[0291] Detection of differential hybridization, when compared to a suitable control, is an indication of the presence in the sample of a polynucleotide that is differentially expressed in a cancer cell. Appropriate controls include, for example, a sample that is known not to contain a polynucleotide that is differentially expressed in a cancer cell, and use of a labeled polynucleotide of the same “sense” as the polynucleotide that is differentially expressed in the cancer cell. Conditions that allow hybridization are known in the art, and have been described in more detail above. Detection can also be accomplished by any known method, including, but not limited to, in situ hybridization, PCR (polymerase chain reaction), RT-PCR (reverse transcription-PCR), TMA, bDNA, and Nasbau and “Northern” or RNA blotting, or combinations of such techniques, using a suitably labeled polynucleotide. A variety of labels and labeling methods for polynucleotides are known in the art and can be used in the assay methods of the invention. Specificity of hybridization can be determined by comparison to appropriate controls.

[0292] Polynucleotides generally comprising at least 10 nt, at least 12 nt or at least 15 contiguous nucleotides of a polynucleotide provided herein, such as, for example, those having the sequence as depicted in Tables 1-10, are used for a variety of purposes, such as probes for detection of and/or measurement of, transcription levels of a polynucleotide that is differentially expressed in a prostate cancer cell. As will be readily appreciated by the ordinarily skilled artisan, the probe can be detectably labeled and contacted with, for example, an array comprising immobilized polynucleotides obtained from a test sample (e.g., mRNA). Alternatively, the probe can be immobilized on an array and the test sample detectably labeled. These and other variations of the methods of the invention are well within the skill in the art and are within the scope of the invention.

[0293] Nucleotide probes are used to detect expression of a gene corresponding to the provided polynucleotide. In Northern blots, mRNA is separated electrophoretically and contacted with a probe. A probe is detected as hybridizing to an mRNA species of a particular size. The amount of hybridization can be quantitated to determine relative amounts of expression, for example under a particular condition. Probes are used for in situ hybridization to cells to detect expression. Probes can also be used in vivo for diagnostic detection of hybridizing sequences. Probes are typically labeled with a radioactive isotope. Other types of detectable labels can be used such as chromophores, fluorophores, and enzymes. Other examples of nucleotide hybridization assays are described in WO92/02526 and U.S. Pat. No. 5,124,246.

[0294] PCR is another means for detecting small amounts of target nucleic acids (see, e.g., Mullis et al., Meth. Enzymol. (1987) 155:335; U.S. Pat. No. 4,683,195; and U.S. Pat. No. 4,683,202). Two primer oligonucleotides that hybridize with the target nucleic acids are used to prime the reaction. The primers can be composed of sequence within or 3′ and 5′ to the CA polynucleotides disclosed herein. Alternatively, if the primers are 3′ and 5′ to these polynucleotides, they need not hybridize to them or the complements. After amplification of the target with a thermostable polymerase, the amplified target nucleic acids can be detected by methods known in the art, e.g., Southern blot. mRNA or cDNA can also be detected by traditional blotting techniques (e.g., Southern blot, Northern blot, etc.) described in Sambrook et al., “Molecular Cloning: A Laboratory Manual” (New York, Cold Spring Harbor Laboratory, 1989) (e.g., without PCR amplification). In general, mRNA or cDNA generated from mRNA using a polymerase enzyme can be purified and separated using gel electrophoresis, and transferred to a solid support, such as nitrocellulose. The solid support is exposed to a labeled probe, washed to remove any unhybridized probe, and duplexes containing the labeled probe are detected.

[0295] Methods using PCR amplification can be performed on the DNA from a single cell, although it is convenient to use at least about 10⁵ cells. The use of the polymerase chain reaction is described in Saiki et al. (1985) Science 239:487, and a review of current techniques may be found in Sambrook, et al. Molecular Cloning: A Laboratory Manual, CSH Press 1989, pp. 14.2-14.33. A detectable label may be included in the amplification reaction. Suitable detectable labels include fluorochromes,(e.g. fluorescein isothiocyanate (FITC), rhodamine, Texas Red, phycoerythrin, allophycocyanin, 6-carboxyfluorescein (6-FAM), 2′,7′-dimethoxy-4′,5′-dichloro-6-carboxyfluorescein, 6-carboxy-X-rhodamine (ROX), 6-carboxy-2′,4′,7′, 4,7-hexachlorofluorescein (HEX), 5-carboxyfluorescein (5-FAM) or N,N,N′,N′-tetramethyl-6-carboxyrhodamine (TAMRA)), radioactive labels, (e.g. ³²P, ³⁵S, ³H, etc.), and the like. The label may be a two stage system, where the polynucleotides is conjugated to biotin, haptens, etc. having a high affinity binding partner, e.g. avidin, specific antibodies, etc., where the binding partner is conjugated to a detectable label. The label may be conjugated to one or both of the primers. Alternatively, the pool of nucleotides used in the amplification is labeled, so as to incorporate the label into the amplification product.

[0296] The detection methods can be provided as part of a kit. Thus, the invention further provides kits for detecting the presence and/or a level of a polynucleotide that is differentially expressed in a cancer cell (e.g., by detection of an mRNA encoded by the differentially expressed gene of interest), and/or a polypeptide encoded thereby, in a biological sample. Procedures using these kits can be performed by clinical laboratories, experimental laboratories, medical practitioners, or private individuals. The kits of the invention for detecting a polypeptide encoded by a polynucleotide that is differentially expressed in a cancer cell may comprise a moiety that specifically binds the polypeptide, which may be an antibody that binds the polypeptide or fragment thereof. The kits of the invention used for detecting a polynucleotide that is differentially expressed in a prostate cancer cell may comprise a moiety that specifically hybridizes to such a polynucleotide. The kit may optionally provide additional components that are useful in the procedure, including, but not limited to, buffers, developing reagents, labels, reacting surfaces, means for detection, control samples, standards, instructions, and interpretive information. Accordingly, the present invention provides kits for detecting prostate cancer comprising at least one of polynucleotides having the sequence as shown in Tables 1-10 or fragments thereof.

[0297] The present invention further relates to methods of detecting/diagnosing a neoplastic or preneoplastic condition in a mammal (for example, a human). “Diagnosis” as used herein generally includes determination of a subject's susceptibility to a disease or disorder, determination as to whether a subject is presently affected by a disease or disorder, prognosis of a subject affected by a disease or disorder (e.g., identification of pre-metastatic or metastatic cancerous states, stages of cancer, or responsiveness of cancer to therapy), and therametrics (e.g., monitoring a subject's condition to provide information as to the effect or efficacy of therapy).

[0298] The terms “treatment”, “treating”, “treat” and the like are used herein to generally refer to obtaining a desired pharmacologic and/or physiologic effect. The effect may be prophylactic in terms of completely or partially preventing a disease or symptom thereof and/or may be therapeutic in terms of a partial or complete stabilization or cure for a disease and/or adverse effect attributable to the disease. “Treatment” as used herein covers any treatment of a disease in a mammal, particularly a human, and includes: (a) preventing the disease or symptom from occurring in a subject which may be predisposed to the disease or symptom but has not yet been diagnosed as having it; (b) inhibiting the disease symptom, i.e., arresting its development; or (c) relieving the disease symptom, i.e., causing regression of the disease or symptom.

[0299] An “effective amount” is an amount sufficient to effect beneficial or desired results, including clinical results. An effective amount can be administered in one or more administrations.

[0300] A “cell sample” encompasses a variety of sample types obtained from an individual and can be used in a diagnostic or monitoring assay. The definition encompasses blood and other liquid samples of biological origin, solid tissue samples such as a biopsy specimen or tissue cultures or cells derived therefrom, and the progeny thereof. The definition also includes samples that have been manipulated in any way after their procurement, such as by treatment with reagents, solubilization, or enrichment for certain components, such as proteins or polynucleotides. The term “cell sample” encompasses a clinical sample, and also includes cells in culture, cell supernatants, cell lysates, serum, plasma, biological fluid, and tissue samples.

[0301] As used herein, the terms “neoplastic cells”, “neoplasia”, “tumor”, “tumor cells”, “cancer” and “cancer cells”, (used interchangeably) refer to cells which exhibit relatively autonomous growth, so that they exhibit an aberrant growth phenotype characterized by a significant loss of control of cell proliferation (i.e., de-regulated cell division). Neoplastic cells can be malignant or benign.

[0302] The terms “individual,” “subject,” “host,” and “patient,” are used interchangeably herein and refer to any mammalian subject for whom diagnosis, treatment, or therapy is desired, particularly humans. Other subjects may include cattle, dogs, cats, guinea pigs, rabbits, rats, mice, horses, and so on. Examples of conditions that can be detected/diagnosed in accordance with these methods include cancers. Polynucleotides corresponding to genes that exhibit the appropriate expression pattern can be used to detect cancer in a subject. For a review of markers of cancer, see, e.g., Hanahan et al. Cell 100:57-70 (2000).

[0303] One detection/diagnostic method comprises: (a) obtaining from a mammal (e.g., a human) a biological sample, (b) detecting the presence in the sample of a CA protein and (c) comparing the amount of product present with that in a control sample. In accordance with this method, the presence in the sample of elevated levels of a CA gene product indicates that the subject has a neoplastic or preneoplastic condition.

[0304] Biological samples suitable for use in this method include biological fluids such as serum, plasma, pleural effusions, urine and cerebro-spinal fluid, CSF, tissue samples (e.g., mammary tumor or prostate tissue slices) can also be used in the method of the invention, including samples derived from biopsies. Cell cultures or cell extracts derived, for example, from tissue biopsies can also be used.

[0305] The compound is preferably a binding protein, e.g., an antibody, polyclonal or monoclonal, or antigen binding fragment thereof, which can be labeled with a detectable marker (e.g., fluorophore, chromophore or isotope, etc). Where appropriate, the compound can be attached to a solid support such as a bead, plate, filter, resin, etc. Determination of formation of the complex can be effected by contacting the complex with a further compound (e.g., an antibody) that specifically binds to the first compound (or complex). Like the first compound, the further compound can be attached to a solid support and/or can be labeled with a detectable marker.

[0306] The identification of elevated levels of CA protein in accordance with the present invention makes possible the identification of subjects (patients) that are likely to benefit from adjuvant therapy. For example, a biological sample from a post primary therapy subject (e.g., subject having undergone surgery) can be screened for the presence of circulating CA protein, the presence of elevated levels of the protein, determined by studies of normal populations, being indicative of residual tumor tissue. Similarly, tissue from the cut site of a surgically removed tumor can be examined (e.g., by immunofluorescence), the presence of elevated levels of product (relative to the surrounding tissue) being indicative of incomplete removal of the tumor. The ability to identify such subjects makes it possible to tailor therapy to the needs of the particular subject. Subjects undergoing non-surgical therapy, e.g., chemotherapy or radiation therapy, can also be monitored, the presence in samples from such subjects of elevated levels of CA protein being indicative of the need for continued treatment. Staging of the disease (for example, for purposes of optimizing treatment regimens) can also be effected, for example, by biopsy e.g.,. with antibody specific for a CA protein.

(g) Animal Models and Transgenics

[0307] In another preferred embodiment CA genes find use in generating animal models of cancers, particularly lymphomas and carcinomas. As is appreciated by one of ordinary skill in the art, when the CA gene identified is repressed or diminished in CA tissue, gene therapy technology wherein antisense RNA directed to the CA gene will also diminish or repress expression of the gene. An animal generated as such serves as an animal model of CA that finds use in screening bioactive drug candidates. Similarly, gene knockout technology, for example as a result of homologous recombination with an appropriate gene targeting vector, will result in the absence of the CA protein. When desired, tissue-specific expression or knockout of the CA protein may be necessary.

[0308] It is also possible that the CA protein is overexpressed in cancer. As such, transgenic animals can be generated that overexpress the CA protein. Depending on the desired expression level, promoters of various strengths can be employed to express the transgene. Also, the number of copies of the integrated transgene can be determined and compared for a determination of the expression level of the transgene. Animals generated by such methods find use as animal models of CA and are additionally useful in screening for bioactive molecules to treat cancer.

Characterization of CA Sequences

[0309] The CA nucleic acid sequences of the invention are depicted in Tables 1-10. The sequences in each Table include genomic DNA sequence (mouse genomic sequences mDxx-yyy; human genomic sequences hDxx-yyy), sequence corresponding to the mRNA(s) generated therefrom (mRxx-yyy; hRxx-yyy) and amino acid sequences of the proteins (mPxx-yyy; hPxx-yyy) encoded by the mRNA for both mouse and human genes. N/A indicates a gene that has been identified, but for which there has not been a name ascribed.

[0310] The mouse and human genomic DNA sequence, sequence corresponding to the mRNA(s) generated therefrom and amino acid sequences of the proteins as shown in Tables 1-10 are described according to SEQ ID NOS as follows in Table 11.

TABLE 11

| DESIGNATION | SEQ ID NO | TYPE OF SEQUENCE |
|---|---|---|
| mD22-005 | SEQ ID NO: 1 | MOUSE GENOMIC SEQUENCE |
| mR22-005.1 | SEQ ID NO: 2 | MOUSE mRNA SEQUENCE |
| mP22-005.1 | SEQ ID NO: 3 | MOUSE PROTEIN SEQUENCE |
| hD22-005 | SEQ ID NO: 4 | HUMAN GENOMIC SEQUENCE |
| hR22-005.1 | SEQ ID NO: 5 | HUMAN mRNA SEQUENCE |
| hP22-005.1 | SEQ ID NO: 6 | HUMAN PROTEIN SEQUENCE |
| hR22-005.2 | SEQ ID NO: 7 | HUMAN mRNA SEQUENCE |
| hP22-005.2 | SEQ ID NO: 8 | HUMAN PROTEIN SEQUENCE |
| hR22-005.3 | SEQ ID NO: 9 | HUMAN mRNA SEQUENCE |
| hP22-005.3 | SEQ ID NO: 10 | HUMAN PROTEIN SEQUENCE |
| hR22-005.4 | SEQ ID NO: 11 | HUMAN mRNA SEQUENCE |
| hP22-005.4 | SEQ ID NO: 12 | HUMAN PROTEIN SEQUENCE |
| mD22-007 | SEQ ID NO: 13 | MOUSE GENOMIC SEQUENCE |
| mR22-007.1 | SEQ ID NO: 14 | MOUSE mRNA SEQUENCE |
| mP22-007.1 | SEQ ID NO: 15 | MOUSE PROTEIN SEQUENCE |
| hD22-007 | SEQ ID NO: 16 | HUMAN GENOMIC SEQUENCE |
| hR22-007.1 | SEQ ID NO: 17 | HUMAN mRNA SEQUENCE |
| hP22-007.1 | SEQ ID NO: 18 | HUMAN PROTEIN SEQUENCE |
| hR22-007.2 | SEQ ID NO: 19 | HUMAN mRNA SEQUENCE |
| hP22-007.2 | SEQ ID NO: 20 | HUMAN PROTEIN SEQUENCE |
| mD22-011 | SEQ ID NO: 21 | MOUSE GENOMIC SEQUENCE |
| mR22-011.1 | SEQ ID NO: 22 | MOUSE mRNA SEQUENCE |
| mP22-011.1 | SEQ ID NO: 23 | MOUSE PROTEIN SEQUENCE |
| hD22-011 | SEQ ID NO: 24 | HUMAN GENOMIC SEQUENCE |
| hR22-011.1 | SEQ ID NO: 25 | HUMAN mRNA SEQUENCE |
| hP22-011.1 | SEQ ID NO: 26 | HUMAN PROTEIN SEQUENCE |
| mD22-016 | SEQ ID NO: 27 | MOUSE GENOMIC SEQUENCE |
| mR22-016.1 | SEQ ID NO: 28 | MOUSE mRNA SEQUENCE |
| mP22-016.1 | SEQ ID NO: 29 | MOUSE PROTEIN SEQUENCE |
| hD22-016 | SEQ ID NO: 30 | HUMAN GENOMIC SEQUENCE |
| hR22-016.1 | SEQ ID NO: 31 | HUMAN mRNA SEQUENCE |
| hP22-016.1 | SEQ ID NO: 32 | HUMAN PROTEIN SEQUENCE |
| mD22-017 | SEQ ID NO: 33 | MOUSE GENOMIC SEQUENCE |
| mR22-017.1 | SEQ ID NO: 34 | MOUSE mRNA SEQUENCE |
| mP22-017.1 | SEQ ID NO: 35 | MOUSE PROTEIN SEQUENCE |
| hD22-017 | SEQ ID NO: 36 | HUMAN GENOMIC SEQUENCE |
| hR22-017.1 | SEQ ID NO: 37 | HUMAN mRNA SEQUENCE |
| hP22-017.1 | SEQ ID NO: 38 | HUMAN PROTEIN SEQUENCE |
| mD22-025 | SEQ ID NO: 39 | MOUSE GENOMIC SEQUENCE |
| mR22-025.1 | SEQ ID NO: 40 | MOUSE mRNA SEQUENCE |
| mP22-025.1 | SEQ ID NO: 41 | MOUSE PROTEIN SEQUENCE |
| hD22-025 | SEQ ID NO: 42 | HUMAN GENOMIC SEQUENCE |
| hR22-025.1 | SEQ ID NO: 43 | HUMAN mRNA SEQUENCE |
| hP22-025.1 | SEQ ID NO: 44 | HUMAN PROTEIN SEQUENCE |
| hR22-025.2 | SEQ ID NO: 45 | HUMAN mRNA SEQUENCE |
| hP22-025.2 | SEQ ID NO: 46 | HUMAN PROTEIN SEQUENCE |
| mD23-001 | SEQ ID NO: 47 | MOUSE GENOMIC SEQUENCE |
| mR23-001.1 | SEQ ID NO: 48 | MOUSE mRNA SEQUENCE |
| mP23-001.1 | SEQ ID NO: 49 | MOUSE PROTEIN SEQUENCE |
| mR23-001.2 | SEQ ID NO: 50 | MOUSE mRNA SEQUENCE |
| mP23-001.2 | SEQ ID NO: 51 | MOUSE PROTEIN SEQUENCE |
| mR23-001.3 | SEQ ID NO: 52 | MOUSE mRNA SEQUENCE |
| mP23-001.3 | SEQ ID NO: 53 | MOUSE PROTEIN SEQUENCE |
| hD23-001 | SEQ ID NO: 54 | HUMAN GENOMIC SEQUENCE |
| hR23-001.1 | SEQ ID NO: 55 | HUMAN mRNA SEQUENCE |
| hP23-001.1 | SEQ ID NO: 56 | HUMAN PROTEIN SEQUENCE |
| hR23-001.2 | SEQ ID NO: 57 | HUMAN mRNA SEQUENCE |
| hP23-001.2 | SEQ ID NO: 58 | HUMAN PROTEIN SEQUENCE |
| hR23-001.3 | SEQ ID NO: 59 | HUMAN mRNA SEQUENCE |
| hP23-001.3 | SEQ ID NO: 60 | HUMAN PROTEIN SEQUENCE |
| hR23-001.4 | SEQ ID NO: 61 | HUMAN mRNA SEQUENCE |
| hP23-001.4 | SEQ ID NO: 62 | HUMAN PROTEIN SEQUENCE |
| hR23-001.5 | SEQ ID NO: 63 | HUMAN mRNA SEQUENCE |
| hP23-001.5 | SEQ ID NO: 64 | HUMAN PROTEIN SEQUENCE |
| mD23-007 | SEQ ID NO: 65 | MOUSE GENOMIC SEQUENCE |
| mR23-007.1 | SEQ ID NO: 66 | MOUSE mRNA SEQUENCE |
| mP23-007.1 | SEQ ID NO: 67 | MOUSE PROTEIN SEQUENCE |
| hD23-007 | SEQ ID NO: 68 | HUMAN GENOMIC SEQUENCE |
| hR23-007.1 | SEQ ID NO: 69 | HUMAN mRNA SEQUENCE |
| hP23-007.1 | SEQ ID NO: 70 | HUMAN PROTEIN SEQUENCE |
| hR23-007.2 | SEQ ID NO: 71 | HUMAN mRNA SEQUENCE |
| hP23-007.2 | SEQ ID NO: 72 | HUMAN PROTEIN SEQUENCE |
| hR23-007.3 | SEQ ID NO: 73 | HUMAN mRNA SEQUENCE |
| hP23-007.3 | SEQ ID NO: 74 | HUMAN PROTEIN SEQUENCE |
| hR23-007.4 | SEQ ID NO: 75 | HUMAN mRNA SEQUENCE |
| hP23-007.4 | SEQ ID NO: 76 | HUMAN PROTEIN SEQUENCE |
| mD23-010 | SEQ ID NO: 77 | MOUSE GENOMIC SEQUENCE |
| mR23-010.1 | SEQ ID NO: 78 | MOUSE mRNA SEQUENCE |
| mP23-010.1 | SEQ ID NO: 79 | MOUSE PROTEIN SEQUENCE |
| hD23-010 | SEQ ID NO: 80 | HUMAN GENOMIC SEQUENCE |
| hR23-010.1 | SEQ ID NO: 81 | HUMAN mRNA SEQUENCE |
| hP23-010.1 | SEQ ID NO: 82 | HUMAN PROTEIN SEQUENCE |
| mD23-013 | SEQ ID NO: 83 | MOUSE GENOMIC SEQUENCE |
| mR23-013.1 | SEQ ID NO: 84 | MOUSE mRNA SEQUENCE |
| mP23-013.1 | SEQ ID NO: 85 | MOUSE PROTEIN SEQUENCE |
| mR23-013.2 | SEQ ID NO: 86 | MOUSE mRNA SEQUENCE |
| mP23-013.2 | SEQ ID NO: 87 | MOUSE PROTEIN SEQUENCE |
| hD23-013 | SEQ ID NO: 88 | HUMAN GENOMIC SEQUENCE |
| hR23-013.1 | SEQ ID NO: 89 | HUMAN mRNA SEQUENCE |
| hP23-013.1 | SEQ ID NO: 90 | HUMAN PROTEIN SEQUENCE |
| hR23-013.2 | SEQ ID NO: 91 | HUMAN mRNA SEQUENCE |
| hP23-013.2 | SEQ ID NO: 92 | HUMAN PROTEIN SEQUENCE |

[0311] The CA sequences were analyzed by Pantherm (Molecular Diagnostics, Palo Alto, Calif.) software designed to detect homologs and enable prediction of molecular function through a system for protein functional classification. Human Gene Ontlogy annotations were prepared in accordance with the Gene Ontology Consortium (Gene Ontology: tool for the unification of biology. The Gene Ontology Consortium Nature Genet. 25: 25-29 (2000)). Similar analysis was carried out by determining IPR information regarding the CA polypeptides from InterPro, which is an integrated documentation resource for protein families, domains and functional sites (Apweiler at al. Bioinformatics 16(12):1145-1150 (2000)).

[0312] The CA sequences may be classified according to the following predicted general classifications of function by Panther™ analysis, human gene ontology and IPR domain information for polypeptides having SEQ ID NOS: 6, 8, 10, 12, 18, 20, 26, 32, 38, 44, 46, 56, 58, 60, 62, 64, 70, 72, 74, 76, 82, 90, and 92 as shown in Tables 1-10. The classifications are shown in Table 12 below.

TABLE 12

| Human Protein | SEQ ID NO: | FUNCTION |
|---|---|---|
| hP22-005.1 | SEQ ID NO: 6 | HUMAN PANTHER CLASSIFICATIONS |
| | | FAMILY (SUBFAMILY) |
| | | SEMAPHORIN(SEMAPHORIN 4C) |
| | | BIOLOGICAL PROCESS |
| | | Signal transduction(2.11.00.00.00) > Cell |
| | | communication(2.11.03.00.00) |
| | | Developmental processes(2.23.00.00.00) > Ectoderm |
| | | development(2.23.08.00.00) > Neurogenesis |
| | | (2.23.08.01.00) |
| | | MOLECULAR FUNCTIONS |
| | | Signaling molecule(1.02.00.00.00) > Membrane- |
| | | bound signaling |
| | | molecule(1.02.07.00.00) |
| | | HUMAN GENE ONTOLOGY |
| | | BIOLOGICAL PROCESS |
| | | ectoderm development > neurogenesis |
| | | apoptosis > anti-apoptosis |
| | | defence response > immune response |
| | | cell communication > cell adhesion |
| | | peptidoglycan catabolism > axon guidance |
| | | axonogenesis > axon guidance |
| | | MOLECULAR FUNCTION |
| | | defense/immunity protein > immunoglobulin |
| | | B cell receptor > immunoglobulin |
| | | GO molecular function > cell adhesion |
| | | CELL COMPONENT |
| | | cell > membrane fraction |
| | | GO cellular component > extracellular |
| | | extracellular > extracellular space |
| | | HUMAN PROTEIN DOMAINS (INTERPRO |
| | | SIGNATURES) |
| | | IPR003659 (PSI) |
| | | IPR003599 (IG) |
| | | IPR001627 (Sema) |
| | | IPR002165 (PSI) |
| | | IPR000694 (PRO RICH) |
| hP22-005.2 | SEQ ID NO: 8 | HUMAN PANTHER CLASSIFICATIONS |
| | | FAMILY (SUBFAMILY) |
| | | SEMAPHORIN(SEMAPHORIN 4C) |
| | | BIOLOGICAL PROCESS |
| | | Signal transduction(2.11.00.00.00) > Cell |
| | | communication(2.11.03.00.00) |
| | | Developmental processes(2.23.00.00.00) > Ectoderm |
| | | development(2.23.08.00.00) > Neurogenesis |
| | | (2.23.08.01.00) |
| | | MOLECULAR FUNCTIONS |
| | | Signaling molecule(1.02.00.00.00) > Membrane- |
| | | bound signaling |
| | | molecule(1.02.07.00.00) |
| | | HUMAN GENE ONTOLOGY |
| | | BIOLOGICAL PROCESS |
| | | ectoderm development > neurogenesis |
| | | apoptosis > anti-apoptosis |
| | | defence response > immune response |
| | | cell communication > cell adhesion |
| | | MOLECULAR FUNCTION |
| | | defense/immunity protein > immunoglobulin |
| | | B cell receptor > immunoglobulin |
| | | GO molecular function > cell adhesion |
| | | CELL COMPONENT |
| | | cell > membrane fraction |
| | | extracellular > extracellular space |
| | | HUMAN PROTEIN DOMAINS (INTERPRO |
| | | SIGNATURES) |
| | | IPR003659 (PSI) |
| | | IPR003599 (IG) |
| | | IPR001627 (Sema) |
| | | IPR002165 (PSI) |
| | | IPR000694 (PRO RICH) |
| hP22-005.3 | SEQ ID NO: 10 | HUMAN PANTHER CLASSIFICATIONS |
| | | FAMILY (SUBFAMILY) |
| | | SEMAPHORIN(SEMAPHORIN 4C) |
| | | BIOLOGICAL PROCESS |
| | | Signal transduction(2.11.00.00.00) > Cell |
| | | communication(2.11.03.00.00) |
| | | Developmental processes(2.23.00.00.00) > Ectoderm |
| | | development(2.23.08.00.00) > Neurogenesis |
| | | (2.23.08.01.00) |
| | | MOLECULAR FUNCTIONS |
| | | Signaling molecule(1.02.00.00.00) > Membrane- |
| | | bound signaling |
| | | molecule(1.02.07.00.00) |
| | | HUMAN GENE ONTOLOGY |
| | | BIOLOGICAL PROCESS |
| | | ectoderm development > neurogenesis |
| | | apoptosis > anti-apoptosis |
| | | defence response > immune response |
| | | cell communication > cell adhesion |
| | | MOLECULAR FUNCTION |
| | | defense/immunity protein > immunoglobulin |
| | | B cell receptor > immunoglobulin |
| | | GO molecular function > cell adhesion |
| | | CELL COMPONENT |
| | | cell > membrane fraction |
| | | extracellular > extracellular space |
| | | HUMAN PROTEIN DOMAINS (INTERPRO |
| | | SIGNATURES) |
| | | IPR003659 (PSI) |
| | | IPR003599 (IG) |
| | | IPR001627 (Sema) |
| | | IPR002165 (PSI) |
| | | IPR000694 (PRO RICH) |
| hP22-005.4 | SEQ ID NO: 12 | HUMAN PANTHER CLASSIFICATIONS |
| | | FAMILY (SUBFAMILY) |
| | | SEMAPHORIN(SEMAPHORIN 4C) |
| | | BIOLOGICAL PROCESS |
| | | Signal transduction(2.11.00.00.00) > Cell |
| | | communication(2.11.03.00.00) |
| | | Developmental processes(2.23.00.00.00) > Ectoderm |
| | | development(2.23.08.00.00) > Neurogenesis |
| | | (2.23.08.01.00) |
| | | MOLECULAR FUNCTIONS |
| | | Signaling molecule(1.02.00.00.00) > Membrane- |
| | | bound signaling |
| | | molecule(1.02.07.00.00) |
| | | HUMAN GENE ONTOLOGY |
| | | BIOLOGICAL PROCESS |
| | | ectoderm development > neurogenesis |
| | | apoptosis > anti-apoptosis |
| | | defence response > immune response |
| | | cell communication > cell adhesion |
| | | MOLECULAR FUNCTION |
| | | defense/immunity protein > immunoglobulin |
| | | B cell receptor > immunoglobulin |
| | | GO molecular function > cell adhesion |
| | | CELL COMPONENT |
| | | cell > membrane fraction |
| | | extracellular > extracellular space |
| | | HUMAN PROTEIN DOMAINS (INTERPRO |
| | | SIGNATURES) |
| | | IPR003659 (PSI) |
| | | IPR003599 (IG) |
| | | IPR001627 (Sema) |
| | | IPR002165 (PSI) |
| | | IPR000694 (PRO RICH) |
| hP22-007.1 | SEQ ID NO: 18 | HUMAN PANTHER CLASSIFICATIONS |
| | | FAMILY (SUBFAMILY) |
| | | TRANSMEMBRANE PROTEIN WITH |
| | | EGF-LIKE AND TWO FOLLISTATIN-LIKE |
| | | DOMAINS 1(TRANSMEMBRANE PROTEIN |
| | | WITH EGF-LIKE AND TWO FOLLISTATIN- |
| | | LIKE DOMAINS 1) |
| | | BIOLOGICAL PROCESS |
| | | Biological process |
| | | unclassified(2.99.00.00.00) |
| | | MOLECULAR FUNCTIONS |
| | | Miscellaneous function(1.98.00.00.00) > Surfactant |
| | | (1.98.05.00.00) |
| | | HUMAN GENE ONTOLOGY |
| | | BIOLOGICAL PROCESS |
| | | ectoderm development > neurogenesis |
| | | MOLECULAR FUNCTION |
| | | proteinase inhibitor > serine protease |
| | | inhibitor |
| | | CELL COMPONENT |
| | | GO cellular component > extracellular |
| | | HUMAN PROTEIN DOMAINS (INTERPRO |
| | | SIGNATURES) |
| | | IPR002350 (KAZAL) |
| | | IPR002350 (kazal) |
| hP22-007.2 | SEQ ID NO: 20 | HUMAN PANTHER CLASSIFICATIONS |
| | | FAMILY (SUBFAMILY) |
| | | TRANSMEMBRANE PROTEIN WITH |
| | | EGF-LIKE AND TWO FOLLISTATIN-LIKE |
| | | DOMAINS 1(TRANSMEMBRANE PROTEIN |
| | | WITH EGF-LIKE AND TWO FOLLISTATIN- |
| | | LIKE DOMAINS 1) |
| | | BIOLOGICAL PROCESS |
| | | Biological process |
| | | unclassified(2.99.00.00.00) |
| | | MOLECULAR FUNCTIONS |
| | | Miscellaneous function(1.98.00.00.00) > Surfactant |
| | | (1.98.05.00.00) |
| | | HUMAN GENE ONTOLOGY |
| | | BIOLOGICAL PROCESS |
| | | ectoderm development > neurogenesis |
| | | MOLECULAR FUNCTION |
| | | proteinase inhibitor > serine protease |
| | | inhibitor |
| | | CELL COMPONENT |
| | | GO cellular component > extracellular |
| | | HUMAN PROTEIN DOMAINS (INTERPRO |
| | | SIGNATURES) |
| | | IPR002350 (KAZAL) |
| | | IPR002350 (kazal) |
| hP22-011.1 | SEQ ID NO: 26 | HUMAN PANTHER CLASSIFICATIONS |
| | | FAMILY (SUBFAMILY) |
| | | Unclassified |
| | | HUMAN GENE ONTOLOGY |
| | | No Gene Ontology |
| | | HUMAN PROTEIN DOMAINS (INTERPRO |
| | | SIGNATURES) |
| | | No Domain Hit |
| hP22-016.1 | SEQ ID NO: 32 | HUMAN PANTHER CLASSIFICATIONS |
| | | FAMILY (SUBFAMILY) |
| | | WNT PROTEIN(WNT-6 PROTEIN) |
| | | BIOLOGICAL PROCESS |
| | | Developmental processes(2.23.00.00.00) > Embryogenesis |
| | | (2.23.04.00.00) |
| | | MOLECULAR FUNCTIONS |
| | | Signaling molecule(1.02.00.00.00) > Other |
| | | signaling molecule(1.02.99.00.00) |
| | | HUMAN GENE ONTOLOGY |
| | | BIOLOGICAL PROCESS |
| | | cell surface receptor linked signal |
| | | transduction > fz2 receptor signaling pathway |
| | | GO biological process > developmental |
| | | processes |
| | | imaginal discs development > imaginal disc |
| | | pattern formation |
| | | wing disc metamorphosis > wing |
| | | morphogenesis |
| | | MOLECULAR FUNCTION |
| | | GO molecular function > cell cycle |
| | | regulator |
| | | CELL COMPONENT |
| | | extracellular > extracellular space |
| | | extracellular > extracellular matrix |
| | | cell > soluble fraction |
| | | HUMAN PROTEIN DOMAINS (INTERPRO |
| | | SIGNATURES) |
| | | IPR005816 (WNTPROTEIN) |
| | | IPR005817 (WNT1) |
| | | IPR005817 (wnt) |
| | | NULL (CYS RICH) |
| hP22-017.1 | SEQ ID NO: 38 | HUMAN PANTHER CLASSIFICATIONS |
| | | FAMILY (SUBFAMILY) |
| | | C-TYPE NATRIURETIC |
| | | PEPTIDE(Unassigned) |
| | | BIOLOGICAL PROCESS |
| | | Blood circulation and gas |
| | | exchange(2.25.00.00.00) > Regulation of |
| | | vasoconstriction, dilation(2.25.01.00.00) |
| | | MOLECULAR FUNCTIONS |
| | | Signaling molecule(1.02.00.00.00) > Protein/ |
| | | peptide hormone(1.02.04.00.00) |
| | | HUMAN GENE ONTOLOGY |
| | | BIOLOGICAL PROCESS |
| | | nucleotide biosynthesis > cGMP |
| | | biosynthesis |
| | | cyclic nucleotide biosynthesis > cGMP |
| | | biosynthesis |
| | | MOLECULAR FUNCTION |
| | | enzyme > guanylate cyclase |
| | | CELL COMPONENT |
| | | extracellular > extracellular space |
| | | HUMAN PROTEIN DOMAINS (INTERPRO |
| | | SIGNATURES) |
| | | IPR002406 (CNATPEPTIDE) |
| | | IPR000663 (NATPEPTIDES) |
| | | IPR000663 (NAT PEP) |
| | | IPR000663 (ANP) |
| | | IPR002406 (sp P23582 ANFC HUMAN) |
| hP22-025.1 | SEQ ID NO: 44 | HUMAN PANTHER CLASSIFICATIONS |
| | | FAMILY (SUBFAMILY) |
| | | CELL ADHESION MOLECULE- |
| | | RELATED(AXONIN) |
| | | BIOLOGICAL PROCESS |
| | | Developmental processes(2.23.00.00.00) > Ectoderm |
| | | development(2.23.08.00.00) > Neurogenesis |
| | | (2.23.08.01.00) |
| | | Cell adhesion(2.29.00.00.00) |
| | | MOLECULAR FUNCTIONS |
| | | Cell adhesion molecule(1.05.00.00.00) > CAM |
| | | family adhesion molecule(1.05.01.00.00) |
| | | HUMAN GENE ONTOLOGY |
| | | BIOLOGICAL PROCESS |
| | | cell communication > cell adhesion |
| | | neurogenesis > central nervous system |
| | | development |
| | | MOLECULAR FUNCTION |
| | | defense/immunity protein > immunoglobulin |
| | | B cell receptor > immunoglobulin |
| | | GO molecular function > cell adhesion |
| | | CELL COMPONENT |
| | | cell > plasma membrane |
| | | plasma membrane > integral plasma |
| | | membrane protein |
| | | plasma membrane > peripheral plasma |
| | | membrane protein |
| | | HUMAN PROTEIN DOMAINS (INTERPRO |
| | | SIGNATURES) |
| | | IPR003962 (FNTYPEIII) |
| | | IPR003961 (FN3) |
| | | IPR003598 (IGc2) |
| | | IPR003599 (IG) |
| | | IPR003961 (fn3) |
| | | IPR003006 (ig) |
| hP22-025.2 | SEQ ID NO: 46 | HUMAN PANTHER CLASSIFICATIONS |
| | | FAMILY (SUBFAMILY) |
| | | CELL ADHESION MOLECULE- |
| | | RELATED(AXONIN) |
| | | BIOLOGICAL PROCESS |
| | | Developmental processes(2.23.00.00.00) > Ectoderm |
| | | development(2.23.08.00.00) > Neurogenesis |
| | | (2.23.08.01.00) |
| | | Cell adhesion(2.29.00.00.00) |
| | | MOLECULAR FUNCTIONS |
| | | Cell adhesion molecule(1.05.00.00.00) > CAM |
| | | family adhesion molecule(1.05.01.00.00) |
| | | HUMAN GENE ONTOLOGY |
| | | BIOLOGICAL PROCESS |
| | | cell communication > cell adhesion |
| | | neurogenesis > central nervous system |
| | | development |
| | | MOLECULAR FUNCTION |
| | | defense/immunity protein > immunoglobulin |
| | | B cell receptor > immunoglobulin |
| | | GO molecular function > cell adhesion |
| | | CELL COMPONENT |
| | | cell > plasma membrane |
| | | plasma membrane > integral plasma |
| | | membrane protein |
| | | plasma membrane > peripheral plasma |
| | | membrane protein |
| | | HUMAN PROTEIN DOMAINS (INTERPRO |
| | | SIGNATURES) |
| | | IPR003962 (FNTYPEIII) |
| | | IPR003961 (FN3) |
| | | IPR003598 (IGc2) |
| | | IPR003599 (IG) |
| | | IPR003961 (fn3) |
| | | IPR003006 (ig) |
| hP23-001.1 | SEQ ID NO: 56 | HUMAN PANTHER CLASSIFICATIONS |
| | | FAMILY (SUBFAMILY) |
| | | CF11939(CALCIUM-TRANSPORTING |
| | | ATPASE PLASMA MEMBRANE) |
| | | BIOLOGICAL PROCESS |
| | | Transport(2.15.00.00.00) > Ion |
| | | transport(2.15.01.00.00) > Cation |
| | | transport(2.15.01.01.00) |
| | | Homeostasis(2.21.00.00.00) > Calcium ion |
| | | homeostasis(2.21.03.00.00) |
| | | MOLECULAR FUNCTIONS |
| | | Transporter(1.10.00.00.00) > Cation |
| | | transporter(1.10.01.00.00) |
| | | Hydrolase(1.21.00.00.00) > Other |
| | | hydrolase(1.21.99.00.00) |
| | | HUMAN GENE ONTOLOGY |
| | | BIOLOGICAL PROCESS |
| | | ion transport > cation transport |
| | | sensory perception > hearing |
| | | DNA alkylation > DNA methylation |
| | | MOLECULAR FUNCTION |
| | | adenosinetriphosphatase > plasma |
| | | membrane cation-transporting ATPase |
| | | obsolete > plasma membrane cation- |
| | | transporting ATPase |
| | | adenosinetriphosphatase > calcium- |
| | | transporting ATPase |
| | | calcium ion transporter > calcium- |
| | | transporting ATPase |
| | | P-type ATPase > calcium-transporting |
| | | ATPase |
| | | protein binding > calmodulin binding |
| | | nucleotide binding > ATP binding |
| | | enzyme > adenosinetriphosphatase |
| | | CELL COMPONENT |
| | | nuclear membrane > nuclear membrane |
| | | lumen |
| | | cell > membrane fraction |
| | | cell > plasma membrane |
| | | plasma membrane > integral plasma |
| | | membrane protein |
| | | HUMAN PROTEIN DOMAINS (INTERPRO |
| | | SIGNATURES) |
| | | IPR001757 (CATATPASE) |
| | | IPR001757 (E1-E2 ATPase) |
| | | IPR000661 (Cation ATPase C) |
| | | IPR004014 (Cation ATPase N) |
| | | IPR005834 (Hydrolase) |
| hP23-001.2 | SEQ ID NO: 58 | HUMAN PANTHER CLASSIFICATIONS |
| | | FAMILY (SUBFAMILY) |
| | | CF11939(CALCIUM-TRANSPORTING |
| | | ATPASE PLASMA MEMBRANE) |
| | | BIOLOGICAL PROCESS |
| | | Transport(2.15.00.00.00) > Ion |
| | | transport(2.15.01.00.00) > Cation |
| | | transport(2.15.01.01.00) |
| | | Homeostasis(2.21.00.00.00) > Calcium ion |
| | | homeostasis(2.21.03.00.00) |
| | | MOLECULAR FUNCTIONS |
| | | Transporter(1.10.00.00.00) > Cation |
| | | transporter(1.10.01.00.00) |
| | | Hydrolase(1.21.00.00.00) > Other |
| | | hydrolase(1.21.99.00.00) |
| | | HUMAN GENE ONTOLOGY |
| | | BIOLOGICAL PROCESS |
| | | ion transport > cation transport |
| | | sensory perception > hearing |
| | | DNA alkylation > DNA methylation |
| | | MOLECULAR FUNCTION |
| | | adenosinetriphosphatase > plasma |
| | | membrane cation-transporting ATPase |
| | | obsolete > plasma membrane cation- |
| | | transporting ATPase |
| | | adenosinetriphosphatase > calcium- |
| | | transporting ATPase |
| | | calcium ion transporter > calcium- |
| | | transporting ATPase |
| | | P-type ATPase > calcium-transporting |
| | | ATPase |
| | | protein binding > calmodulin binding |
| | | nucleotide binding > ATP binding |
| | | enzyme > adenosinetriphosphatase |
| | | CELL COMPONENT |
| | | nuclear membrane > nuclear membrane |
| | | lumen |
| | | cell > membrane fraction |
| | | cell > plasma membrane |
| | | plasma membrane > integral plasma |
| | | membrane protein |
| | | HUMAN PROTEIN DOMAINS (INTERPRO |
| | | SIGNATURES) |
| | | IPR001757 (CATATPASE) |
| | | IPR001757 (E1-E2 ATPase) |
| | | IPR000661 (Cation ATPase C) |
| | | IPR004014 (Cation ATPase N) |
| | | IPR005834 (Hydrolase) |
| hP23-001.3 | SEQ ID NO: 60 | HUMAN PANTHER CLASSIFICATIONS |
| | | FAMILY (SUBFAMILY) |
| | | Unclassified |
| | | HUMAN GENE ONTOLOGY |
| | | BIOLOGICAL PROCESS |
| | | ion transport > cation transport |
| | | sensory perception > hearing |
| | | MOLECULAR FUNCTION |
| | | protein binding > calmodulin binding |
| | | adenosinetriphosphatase > plasma |
| | | membrane cation-transporting ATPase |
| | | obsolete > plasma membrane cation- |
| | | transporting ATPase |
| | | adenosinetriphosphatase > calcium- |
| | | transporting ATPase |
| | | calcium ion transporter > calcium- |
| | | transporting ATPase |
| | | P-type ATPase > calcium-transporting |
| | | ATPase |
| | | nucleotide binding > ATP binding |
| | | enzyme > adenosinetriphosphatase |
| | | CELL COMPONENT |
| | | cell > membrane fraction |
| | | cell > plasma membrane |
| | | plasma membrane > integral plasma |
| | | membrane protein |
| | | HUMAN PROTEIN DOMAINS (INTERPRO |
| | | SIGNATURES) |
| | | No Domain Hit |
| hP23-001.4 | SEQ ID NO: 62 | HUMAN PANTHER CLASSIFICATIONS |
| | | FAMILY (SUBFAMILY) |
| | | CF11939(CALCIUM-TRANSPORTING |
| | | ATPASE PLASMA MEMBRANE) |
| | | BIOLOGICAL PROCESS |
| | | Transport(2.15.00.00.00) > Ion |
| | | transport(2.15.01.00.00) > Cation |
| | | transport(2.15.01.01.00) |
| | | Homeostasis(2.21.00.00.00) > Calcium ion |
| | | homeostasis(2.21.03.00.00) |
| | | MOLECULAR FUNCTIONS |
| | | Transporter(1.10.00.00.00) > Cation |
| | | transporter(1.10.01.00.00) |
| | | Hydrolase(1.21.00.00.00) > Other |
| | | hydrolase(1.21.99.00.00) |
| | | HUMAN GENE ONTOLOGY |
| | | BIOLOGICAL PROCESS |
| | | ion transport > cation transport |
| | | sensory perception > hearing |
| | | DNA alkylation > DNA methylation |
| | | MOLECULAR FUNCTION |
| | | protein binding > calmodulin binding |
| | | adenosinetriphosphatase > plasma |
| | | membrane cation-transporting ATPase |
| | | obsolete > plasma membrane cation- |
| | | transporting ATPase |
| | | adenosinetriphosphatase > calcium- |
| | | transporting ATPase |
| | | calcium ion transporter > calcium- |
| | | transporting ATPase |
| | | P-type ATPase > calcium-transporting |
| | | ATPase |
| | | nucleotide binding > ATP binding |
| | | enzyme > adenosinetriphosphatase |
| | | CELL COMPONENT |
| | | nuclear membrane > nuclear membrane |
| | | lumen |
| | | cell > membrane fraction |
| | | cell > plasma membrane |
| | | plasma membrane > integral plasma |
| | | membrane protein |
| | | HUMAN PROTEIN DOMAINS (INTERPRO |
| | | SIGNATURES) |
| | | IPR001757 (CATATPASE) |
| | | IPR001757 (E1-E2 ATPase) |
| | | IPR000661 (Cation ATPase C) |
| | | IPR004014 (Cation ATPase N) |
| | | IPR005834 (Hydrolase) |
| hP23-001.5 | SEQ ID NO: 64 | HUMAN PANTHER CLASSIFICATIONS |
| | | FAMILY (SUBFAMILY) |
| | | CF11939(CALCIUM-TRANSPORTING |
| | | ATPASE PLASMA MEMBRANE) |
| | | BIOLOGICAL PROCESS |
| | | Transport(2.15.00.00.00) > Ion |
| | | transport(2.15.01.00.00) > Cation |
| | | transport(2.15.01.01.00) |
| | | Homeostasis(2.21.00.00.00) > Calcium ion |
| | | homeostasis(2.21.03.00.00) |
| | | MOLECULAR FUNCTIONS |
| | | Transporter(1.10.00.00.00) > Cation |
| | | transporter(1.10.01.00.00) |
| | | Hydrolase(1.21.00.00.00) > Other |
| | | hydrolase(1.21.99.00.00) |
| | | HUMAN GENE ONTOLOGY |
| | | BIOLOGICAL PROCESS |
| | | ion transport > cation transport |
| | | sensory perception > hearing |
| | | DNA alkylation > DNA methylation |
| | | MOLECULAR FUNCTION |
| | | adenosinetriphosphatase > plasma |
| | | membrane cation-transporting ATPase |
| | | obsolete > plasma membrane cation- |
| | | transporting ATPase |
| | | adenosinetriphosphatase > calcium- |
| | | transporting ATPase |
| | | calcium ion transporter > calcium- |
| | | transporting ATPase |
| | | P-type ATPase > calcium-transporting |
| | | ATPase |
| | | protein binding > calmodulin binding |
| | | nucleotide binding > ATP binding |
| | | enzyme > adenosinetriphosphatase |
| | | CELL COMPONENT |
| | | nuclear membrane > nuclear membrane |
| | | lumen |
| | | cell > membrane fraction |
| | | cell > plasma membrane |
| | | plasma membrane > integral plasma |
| | | membrane protein |
| | | HUMAN PROTEIN DOMAINS (INTERPRO |
| | | SIGNATURES) |
| | | IPR001757 (CATATPASE) |
| | | IPR001757 (E1-E2 ATPase) |
| | | IPR000661 (Cation ATPase C) |
| | | IPR004014 (Cation ATPase N) |
| | | IPR005834 (Hydrolase) |
| hP23-007.1 | SEQ ID NO: 70 | HUMAN PANTHER CLASSIFICATIONS |
| | | FAMILY (SUBFAMILY) |
| | | MHC CLASS I ANTIGEN(MHC CLASS I |
| | | ANTIGEN) |
| | | BIOLOGICAL PROCESS |
| | | Immunity and defense(2.16.00.00.00) > T- |
| | | cell mediated immunity(2.16.01.00.00) > MHCI- |
| | | mediated immunity(2.16.01.01.00) |
| | | MOLECULAR FUNCTIONS |
| | | Defense/immunity protein(1.25.00.00.00) > Major |
| | | histocompatibility complex |
| | | antigen(1.25.02.00.00) |
| | | HUMAN GENE ONTOLOGY |
| | | BIOLOGICAL PROCESS |
| | | defence response > immune response |
| | | stress response > defence response |
| | | defence response > cellular defense |
| | | response |
| | | endocytosis > receptor mediated |
| | | endocytosis |
| | | MOLECULAR FUNCTION |
| | | molecular_function unknown > minor |
| | | histocompatibility antigen |
| | | major histocompatibility complex antigen > class |
| | | I major histocompatibility complex antigen |
| | | defense/immunity protein > major |
| | | histocompatibility complex antigen |
| | | defense/immunity protein > immunoglobulin |
| | | B cell receptor > immunoglobulin |
| | | CELL COMPONENT |
| | | cell > membrane fraction |
| | | cell > plasma membrane |
| | | plasma membrane > integral plasma |
| | | membrane protein |
| | | HUMAN PROTEIN DOMAINS (INTERPRO |
| | | SIGNATURES) |
| | | IPR001039 (MHCCLASSI) |
| | | IPR001039 (MHC I) |
| | | IPR001039 (sp O97986 O97986 HUMAN) |
| hP23-007.2 | SEQ ID NO: 72 | HUMAN PANTHER CLASSIFICATIONS |
| | | FAMILY (SUBFAMILY) |
| | | MHC CLASS I HISTOCOMPATIBILITY |
| | | ANTIGEN-RELATED(MHC CLASS I- |
| | | RELATED) |
| | | BIOLOGICAL PROCESS |
| | | Immunity and defense(2.16.00.00.00) > T- |
| | | cell mediated immunity(2.16.01.00.00) > MHCI- |
| | | mediated immunity(2.16.01.01.00) |
| | | MOLECULAR FUNCTIONS |
| | | Defense/immunity protein(1.25.00.00.00) > Major |
| | | histocompatibility complex |
| | | antigen(1.25.02.00.00) |
| | | HUMAN GENE ONTOLOGY |
| | | BIOLOGICAL PROCESS |
| | | defence response > immune response |
| | | neurogenesis > central nervous system |
| | | development |
| | | DNA dependent DNA replication > DNA |
| | | topological change |
| | | MOLECULAR FUNCTION |
| | | major histocompatibility complex antigen > class |
| | | I major histocompatibility complex antigen |
| | | defense/immunity protein > major |
| | | histocompatibility complex antigen |
| | | molecular_function unknown > minor |
| | | histocompatibility antigen |
| | | enzyme > nitric oxide synthase |
| | | nucleotide binding > ATP binding |
| | | CELL COMPONENT |
| | | cell > membrane fraction |
| | | mitochondrial membrane > mitochondrial |
| | | inner membrane |
| | | HUMAN PROTEIN DOMAINS (INTERPRO |
| | | SIGNATURES) |
| | | IPR003597 (IGc1) |
| | | IPR001039 (MHC I) |
| | | IPR001039 (sp O97986 O97986 HUMAN) |
| hP23-007.3 | SEQ ID NO: 74 | HUMAN PANTHER CLASSIFICATIONS |
| | | FAMILY (SUBFAMILY) |
| | | MHC CLASS I ANTIGEN(MHC CLASS I |
| | | ANTIGEN) |
| | | BIOLOGICAL PROCESS |
| | | Immunity and defense(2.16.00.00.00) > T- |
| | | cell mediated immunity(2.16.01.00.00) > MHCI- |
| | | mediated immunity(2.16.01.01.00) |
| | | MOLECULAR FUNCTIONS |
| | | Defense/immunity protein(1.25.00.00.00) > Major |
| | | histocompatibility complex |
| | | antigen(1.25.02.00.00) |
| | | HUMAN GENE ONTOLOGY |
| | | BIOLOGICAL PROCESS |
| | | defence response > immune response |
| | | stress response > defence response |
| | | defence response > cellular defense |
| | | response |
| | | endocytosis > receptor mediated |
| | | endocytosis |
| | | neurogenesis > central nervous system |
| | | development |
| | | MOLECULAR FUNCTION |
| | | molecular_function unknown > minor |
| | | histocompatibility antigen |
| | | major histocompatibility complex antigen > class |
| | | I major histocompatibility complex antigen |
| | | defense/immunity protein > major |
| | | histocompatibility complex antigen |
| | | defense/immunity protein > immunoglobulin |
| | | B cell receptor > immunoglobulin |
| | | enzyme > nitric oxide synthase |
| | | CELL COMPONENT |
| | | cell > membrane fraction |
| | | mitochondrial membrane > mitochondrial |
| | | inner membrane |
| | | cell > plasma membrane |
| | | plasma membrane > integral plasma |
| | | membrane protein |
| | | HUMAN PROTEIN DOMAINS (INTERPRO |
| | | SIGNATURES) |
| | | IPR001039 (MHCCLASSI) |
| | | IPR001039 (MHC I) |
| | | IPR001039 (sp O97986 O97986 HUMAN) |
| hP23-007.4 | SEQ ID NO: 76 | HUMAN PANTHER CLASSIFICATIONS |
| | | FAMILY (SUBFAMILY) |
| | | MHC CLASS I HISTOCOMPATIBILITY |
| | | ANTIGEN-RELATED(MHC CLASS I- |
| | | RELATED) |
| | | BIOLOGICAL PROCESS |
| | | Immunity and defense(2.16.00.00.00) > T- |
| | | cell mediated immunity(2.16.01.00.00) > MHCI- |
| | | mediated immunity(2.16.01.01.00) |
| | | MOLECULAR FUNCTIONS |
| | | Defense/immunity protein(1.25.00.00.00) > Major |
| | | histocompatibility complex |
| | | antigen(1.25.02.00.00) |
| | | HUMAN GENE ONTOLOGY |
| | | BIOLOGICAL PROCESS |
| | | defence response > immune response |
| | | endocytosis > receptor mediated |
| | | endocytosis |
| | | neurogenesis > central nervous system |
| | | development |
| | | DNA dependent DNA replication > DNA |
| | | topological change |
| | | MOLECULAR FUNCTION |
| | | major histocompatibility complex antigen > class |
| | | I major histocompatibility complex antigen |
| | | defense/immunity protein > major |
| | | histocompatibility complex antigen |
| | | molecular_function unknown > minor |
| | | histocompatibility antigen |
| | | defense/immunity protein > immunoglobulin |
| | | B cell receptor > immunoglobulin |
| | | enzyme > nitric oxide synthase |
| | | CELL COMPONENT |
| | | cell > membrane fraction |
| | | mitochondrial membrane > mitochondrial |
| | | inner membrane |
| | | plasma membrane > integral plasma |
| | | membrane protein |
| | | HUMAN PROTEIN DOMAINS (INTERPRO |
| | | SIGNATURES) |
| | | IPR001039 (MHCCLASSI) |
| | | IPR003597 (IGc1) |
| | | IPR001039 (MHC I) |
| | | IPR001039 (sp O97986 O97986 HUMAN) |
| hP23-010.1 | SEQ ID NO: 82 | HUMAN PANTHER CLASSIFICATIONS |
| | | FAMILY (SUBFAMILY) |
| | | NEUROPILIN AND RELATED F5/8 |
| | | DOMAIN-CONTAINING |
| | | PROTEIN(COAGULATION FACTOR V) |
| | | BIOLOGICAL PROCESS |
| | | Protein metabolism and |
| | | modification(2.05.00.00.00) > Proteolysis |
| | | (2.05.04.00.00) |
| | | Blood clotting(2.20.00.00.00) |
| | | MOLECULAR FUNCTIONS |
| | | Miscellaneous function(1.98.00.00.00) > Other |
| | | miscellaneous function |
| | | protein(1.98.99.00.00) |
| | | HUMAN GENE ONTOLOGY |
| | | BIOLOGICAL PROCESS |
| | | JAK-STAT cascade > STAT protein |
| | | nuclear translocation |
| | | cell communication > cell adhesion |
| | | MOLECULAR FUNCTION |
| | | defense/immunity protein > blood |
| | | coagulation factor |
| | | heavy metal binding > copper binding |
| | | GO molecular function > cell adhesion |
| | | CELL COMPONENT |
| | | extracellular > extracellular space |
| | | cytoplasm > lipid particle |
| | | HUMAN PROTEIN DOMAINS (INTERPRO |
| | | SIGNATURES) |
| | | IPR000421 (FA58C) |
| | | IPR000421 (F5 F8 type C) |
| | | IPR001117 (Cu-oxidase) |
| | | IPR000421 (DS DOMAIN 2) |
| hP23-013.1 | SEQ ID NO: 90 | HUMAN PANTHER CLASSIFICATIONS |
| | | FAMILY (SUBFAMILY) |
| | | T-CELL SURFACE GLYCOPROTEIN |
| | | CD3 ZETA CHAIN(Unassigned) |
| | | BIOLOGICAL PROCESS |
| | | Signal transduction(2.11.00.00.00) > Cell |
| | | communication(2.11.03.00.00) > Ligand-mediated |
| | | signaling(2.11.03.03.00) |
| | | Signal transduction(2.11.00.00.00) > Intracellular |
| | | signaling cascade(2.11.02.00.00) > Calcium |
| | | mediated signaling(2.11.02.02.00) > MAPKKK |
| | | cascade(2.11.02.03.00) > JNK |
| | | cascade(2.11.02.05.00) |
| | | Immunity and defense(2.16.00.00.00) > T- |
| | | cell mediated immunity(2.16.01.00.00) |
| | | MOLECULAR FUNCTIONS |
| | | Molecular function |
| | | unclassified(1.97.00.00.00) |
| | | HUMAN GENE ONTOLOGY |
| | | BIOLOGICAL PROCESS |
| | | defence response > cellular defense |
| | | response |
| | | MOLECULAR FUNCTION |
| | | molecular_function unknown > lymphocyte |
| | | antigen |
| | | CELL COMPONENT |
| | | cell > membrane fraction |
| | | cell > plasma membrane |
| | | plasma membrane > integral plasma |
| | | membrane protein |
| | | HUMAN PROTEIN DOMAINS (INTERPRO |
| | | SIGNATURES) |
| | | IPR003110 (ITAM) |
| | | IPR003110 (ITAM) |
| hP23-013.2 | SEQ ID NO: 92 | HUMAN PANTHER CLASSIFICATIONS |
| | | FAMILY (SUBFAMILY) |
| | | T-CELL SURFACE GLYCOPROTEIN |
| | | CD3 ZETA CHAIN(Unassigned) |
| | | BIOLOGICAL PROCESS |
| | | Signal transduction(2.11.00.00.00) > Cell |
| | | communication(2.11.03.00.00) > Ligand-mediated |
| | | signaling(2.11.03.03.00) |
| | | Signal transduction(2.11.00.00.00) > Intracellular |
| | | signaling cascade(2.11.02.00.00) > Calcium |
| | | mediated signaling(2.11.02.02.00) > MAPKKK |
| | | cascade(2.11.02.03.00) > JNK |
| | | cascade(2.11.02.05.00) |
| | | Immunity and defense(2.16.00.00.00) > T- |
| | | cell mediated immunity(2.16.01.00.00) |
| | | MOLECULAR FUNCTIONS |
| | | Molecular function |
| | | unclassified(1.97.00.00.00) |
| | | HUMAN GENE ONTOLOGY |
| | | BIOLOGICAL PROCESS |
| | | defence response > cellular defense |
| | | response |
| | | MOLECULAR FUNCTION |
| | | molecular_function unknown > lymphocyte |
| | | antigen |
| | | CELL COMPONENT |
| | | cell > membrane fraction |
| | | cell > plasma membrane |
| | | plasma membrane > integral plasma |
| | | membrane protein |
| | | HUMAN PROTEIN DOMAINS (INTERPRO |
| | | SIGNATURES) |
| | | IPR003110 (ITAM) |
| | | IPR003110 (ITAM) |

[0313] A CA protein (CAP) is a signalling protein wherein the CAP sequence is selected from the group consisting of SEQ ID NOS: 6, 8, 10, 12, 32, 38, 38, 90 and 92 shown in Tables 1-10.

[0314] A CA protein (CAP) is a cell adhesion protein wherein the CAP sequence is selected from the group consisting of SEQ ID NOS: 6, 8, 10, 12, 44, 46 and 82.

[0315] A CA protein (CAP) is a serine protease inhibitor wherein the CAP sequence is selected from the group consisting of SEQ ID NOS: 18 and 20.

[0316] A CA protein (CAP) is an ion transport protein wherein the CAP sequence is selected from the group consisting of SEQ ID NOS: 56, 58, 60, 62 and 64.

[0317] A CA protein (CAP) is a major histocompatibility antigen protein wherein the CAP sequence is selected from the group consisting of SEQ ID NOS:70, 72, 74 and 76.

[0318] A CA protein (CAP) is expressed on a cell surface, wherein the CA protein is selected from the group consisting of SEQ ID NOS: 6, 8, 10, 12, 18, 20, 26, 32, 38, 44, 46, 56, 58, 60, 62, 64, 70, 72, 74, 76, 82, 90, and 92.

[0319] Certain aspects of the present invention are described in greater detail in the non-limiting examples that follow.

### EXAMPLES

[0320] The following examples are put forth so as to provide those of ordinary skill in the art with a complete disclosure and description of how to make and use the present invention, and are not intended to limit the scope of what the inventors regard as their invention nor are they intended to represent that the experiments below are all and only experiments performed. Efforts have been made to ensure accuracy with respect to numbers used (e.g. amounts, temperature, etc.) but some experimental errors and deviations should be accounted for. Unless indicated otherwise, parts are parts by weight, molecular weight is weight average molecular weight, temperature is in degrees Celsius, and pressure is at or near atmospheric.

### Example 1

### Insertion Site Analysis Following Tumor Induction in Mice

[0321] Tumors are induced in mice using either mouse mammary tumor virus (MMTV) or murine leukemia virus (MLV). MMTV causes mammary adenocarcinomas and MLV causes a variety of different hematopoetic malignancies (primarily T- or B-cell lymphomas). Three routes of infection are used: (1) injection of neonates with purified virus preparations, (2) infection by milk-borne virus during nursing, and (3) genetic transmission of pathogenic proviruses via the germ-line (Akvr1 and/or Mtv2). The type of malignancy present in each affected mouse is determined by histological analysis of H&E-stained thin sections of formalin-fixed, paraffin-embedded biopsy samples. Host DNA sequences flanking all clonally-integrated proviruses in each tumor are recovered by nested anchored-PCR using two virus-specific primers and two primers specific for a 40 bp double stranded DNA anchor ligated to restriction enzyme digested tumor DNA. Amplified bands representing host/virus junction fragments are cloned and sequenced. Then the host sequences (called “tags”) are used to BLAST analyze the Celera mouse genomic sequence. For each individual tag, three parameters are recorded: (1) the mouse chromosome assignment, (2) base pair coordinates at which the integration occurred, and (3) provirus orientation. Using this information, all available tags from all analyzed tumors are mapped to the mouse genome. To identify the protooncogene targets of provirus insertion mutation, the provirus integration pattern at each cluster of integrants is analyzed relative to the locations of all known genes in the transcriptome. The presence of provirus at the same locus in two or more independent tumors is prima facie evidence that a protooncogene is present at or very near the proviral integration sites. This is because the genome is too large for random integrations to result in observable clustering. Any clustering that is detected is unequivocal evidence for biological selection during tumorigenesis. In order to identify the human orthologs of the protooncogene targets of provirus insertion mutation, a comparative analysis of syntenic regions of the mouse and human genomes is performed.

[0322] An example of PCR amplification of host/virus junction fragments is presented in FIG. 1. Lane 1 contains the amplification products from normal control DNA and lane 2 contains the amplification products from tumor DNA. The bands result from 5′ host/virus junction fragments present in the DNA samples. Lane 1 has bands from the env/3′ LTR junctions from all proviruses (upper) and the host/5′ LTR from the pathogenic endogenous Mtv2 provirus present in this particular mouse strain. This endogenous provirus is detected because its sequence is identical to the new clonally integrated proviruses in the tumor. All four new clonally integrated proviruses known to be in this tumor are readily detected.

### Example 2

### Analysis of Quantitative RT-PCR: Comparative CT Method

[0323] The expression level of target genes is quantified using the ABI PRISM 7900HT Sequence Detection System (Applied Biosystems, Calif.). The method is based on the quantitation of the initial copy number of target template in comparison to that of a reference (normalizer) housekeeper gene (Pre-Developed TaqMan® Assay Reagents Gene Expression Quantification Protocol, Applied Biosystems, 2001). Accumulation of DNA product with each PCR cycle is related to amplicon efficiency and the initial template concentration. Therefore the amplification efficiency of both the target and the normalizer must be approximately equal. The threshold cycle (C_{T}), which is dependent on the starting template copy number and the DNA amplification efficiency, is a PCR cycle during which PCR product growth is exponential. With a similar dynamic range for the target and normalizer, the comparative C_{T} method is applicable.

[0324] An example of the comparative C_{T} method of gene expression for quantitative RT-PCR is shown in FIG. 2. In the first step, assays are performed in quadruplicate on a normal tissue and several sample tissues. In these tissues, the means and standard deviations of C_{T} values are determined for housekeeper genes (chosen as controls if shown to be biologically stable among various samples, irrespective of disease state) and for the target gene. FIG. 2 shows an example of average C_{T} values for a housekeeper gene and target gene. These values can fall within a range from upper teens to 40 depending on the intrinsic expression level of the gene in the particular tissue. The coefficient of variance of all replicate sets cannot exceed 1.5%.

[0325] An assessment of how the ΔC_{T} changes with template dilution verifies that the efficiencies of the target and housekeeper amplicons are approximately equal if the log input amount of template RNA versus ΔC_{T} plot has a slope<0. 10. With the relative efficiencies verified for target and housekeeper, the ΔΔC_{T} comparative calculation becomes valid, as mentioned above. An example of the calculated difference between the C_{T} values of target and housekeeper genes (ΔC_{T}) for various samples is shown in FIG. 3. The ΔΔC_{T} is calculated for each sample by subtracting its ΔC_{T} value from the ΔC_{T} value of the baseline (calibrator) sample. If the expression is increased in some samples and decreased in others, ΔΔC_{T} will be a mixture of negative and positive values. The final step in the calculation is to transform these values to absolute values. The formula for this is:
Comparative expression level=2^{-ΔΔCT}

[0326] The final value for the calibrator should always be one. FIG. 4 shows the ΔΔC_{T} and comparative expression level for each sample from FIG. 3.

### Example 3

### Detection of Elevated Levels of cDNA Associated with Cancer Using Arrays

[0327] cDNA sequences representing a variety of candidate CA genes to be screened for differential expression in cancer are assayed by hybridization on polynucleotide arrays. The cDNA sequences include cDNA clones isolated from cell lines or tissues of interest. The cDNA sequences analyzed also include polynucleotides comprising sequence overlap with sequences in the Unigene database, and which encode a variety of gene products of various origins, functionality, and levels of characterization. cDNAs are spotted onto reflective slides (Amersham) according to methods well known in the art at a density of 9,216 spots per slide representing 4,068 sequences (including controls) spotted in duplicate, with approximately 0.8 μl of an approximately 200 ng/μl solution of cDNA.

[0328] PCR products of selected cDNA clones corresponding to the gene products of interest are prepared in a 50% DMSO solution. These PCR products are spotted onto Amersham aluminum microarray slides at a density of 9216 clones per array using a Molecular Dynamics Generation III spotting robot. Clones are spotted in duplicate, for a total of 4608 different sequences per chip.

[0329] cDNA probes are prepared from total RNA obtained by laser capture microdissection (LCM, Arcturus Enginering Inc., Mountain View, Calif.) of tumor tissue samples and normal tissue samples isolated from patients.

[0330] Total RNA is first reverse transcribed into cDNA using a primer containing a T7 RNA polymerase promoter, followed by second strand DNA synthesis. cDNA is then transcribed in vitro to produce antisense RNA using the T7 promoter-mediated expression (see, e.g., Luo et al. (1999) Nature Med 5:117-122), and the antisense RNA is then converted into cDNA. The second set of cDNAs are again transcribed in vitro, using the T7 promoter, to provide antisense RNA. This antisense RNA is then fluorescently labeled, or the RNA is again converted into cDNA, allowing for a third round of T7-mediated amplification to produce more antisense RNA. Thus the procedure provides for two or three rounds of in vitro transcription to produce the final RNA used for fluorescent labeling. Probes are labeled by making fluorescently labeled cDNA from the RNA starting material. Fluorescently labeled cDNAs prepared from the tumor RNA sample are compared to fluorescently labeled cDNAs prepared from normal cell RNA sample. For example, the cDNA probes from the normal cells are labeled with Cy3 fluorescent dye (green) and the cDNA probes prepared from suspected cancer cells are labeled with Cy5 fluorescent dye (red).

[0331] The differential expression assay is performed by mixing equal amounts of probes from tumor cells and normal cells of the same patient. The arrays are prehybridized by incubation for about 2 hrs at 60° C. in 5×SSC, 0.2% SDS, 1 mM EDTA, and then washing three times in water and twice in isopropanol. Following prehybridization of the array, the probe mixture is then hybridized to the array under conditions of high stringency (overnight at 42° C. in 50% formamide, 5×SSC, and 0.2% SDS. After hybridization, the array is washed at 55° C. three times as follows: 1) first wash in 1×SSC/0.2% SDS; 2) second wash in 0.1×SSC/0.2% SDS; and 3) third wash in 0.1×SSC.

[0332] The arrays are then scanned for green and red fluorescence using a Molecular Dynamics Generation III dual color laser-scanner/detector. The images are processed using BioDiscovery Autogene software, and the data from each scan set normalized. The experiment is repeated, this time labeling the two probes with the opposite color in order to perform the assay in both “color directions.” Each experiment is sometimes repeated with two more slides (one in each color direction). The data from each scan is normalized, and the level of fluorescence for each sequence on the array expressed as a ratio of the geometric mean of 8 replicate spots/genes from the four arrays or 4 replicate spots/gene from 2 arrays or some other permutation.

[0333] Normalization: The objective of normalization is to generate a cDNA library in which all transcripts expressed in a particular cell type or tissue are equally represented (S. M. Weissman, Mol Biol. Med. 4(3):133-143 (1987); Patanjali, et al., Proc. Natl. Acad. Sci. USA 88(5):1943-1947 (1991)), and therefore isolation of as few as 30,000 recombinant clones in an optimally normalized library may represent the entire gene expression repertoire of a cell, estimated to number 10,000 per cell.

[0334] Total RNA is extracted from harvested cells using RNeasy™ Protect Kit (Qiagen, Valencia, Calif.), following manufacturer's recommended procedures. RNA is quantified using RiboGreen™ RNA quantification kit (Molecular Probes, Inc. Eugene, Oreg.). One μg of total RNA is reverse transcribed and PCR amplified using SMART™ PCR cDNA synthesis kit (ClonTech, Palo Alto, Calif.). The cDNA products are size-selected by agarose gel electrophoresis using standard procedures (Sambrook, J. T., et al. Molecular Cloning: A Laboratory Manual, 2d ed., Cold Spring Harbor Laboratory Press, NY). The cDNA is extracted using Bio 101 Genecleang II kit (Qbiogene, Carlsbad, Calif.). Normalization of the cDNA is carried out using kinetics of hybridization principles: 1.0 μg of cDNA is denatured by heat at 100° C. for 10 minutes, then incubated at 42° C. for 42 hours in the presence of 120 mM NaCl, 10 mM Tris.HCl (pH=8.0), 5 mM EDTA.Na+ and 50% formamide. Single-stranded cDNA (“normalized”) is purified by hydroxyapatite chromatography (#130-0520, BioRad, Hercules, Calif.) following the manufacturer's recommended procedures, amplified and converted to double-stranded cDNA by three cycles of PCR amplification, and cloned into plasmid vectors using standard procedures (Sambrook, J. T., et al. Molecular Cloning: A Laboratory Manual, 2d ed., Cold Spring Harbor Laboratory Press, NY). All primers/adaptors used in the normalization and cloning process are provided by the manufacturer in the SMART™ PCR cDNA synthesis kit (ClonTech, Palo Alto, Calif.). Supercompetent cells (XL-2 Blue Ultracompetent Cells, Stratagene, Calif.) are transfected with the normalized cDNA libraries, plated on solid media and grown overnight at 36° C.

[0335] The sequences of 10,000 recombinants per normalized library are analyzed by capillary sequencing using the ABI PRISM 3700 DNA Analyzer (Applied Biosystems, California). To determine the representation of transcripts in a library, BLAST analysis is performed on the clone sequences to assign transcript identity to each isolated clone, i.e., the sequences of the isolated polynucleotides are first masked to eliminate low complexity sequences using the XBLAST masking program (Claverie “Effective Large-Scale Sequence Similarity Searches,” Computer Methods for Macromolecular Sequence Analysis, Doolittle, ed., Meth. Enzymol. 266:212-227 Academic Press, NY, N.Y. (1996); see particularly Claverie, in “Automated DNA Sequencing and Analysis Techniques” Adams et al., eds., Chap. 36, p. 267 Academic Press, San Diego, 1994 and Claverie et al. Comput. Chem. (1993) 17:191). Generally, masking does not influence the final search results, except to eliminate sequences of relative little interest due to their low complexity, and to eliminate multiple “hits” based on similarity to repetitive regions common to multiple sequences, e.g., A1u repeats. The remaining sequences are then used in a BLASTN vs. GenBank search. The sequences are also used as query sequence in a BLASTX vs. NRP (non-redundant proteins) database search.

[0336] Automated sequencing reactions are performed using a Perkin-Elmer PRISM Dye Terminator Cycle Sequencing Ready Reaction Kit containing AmpliTaq DNA Polymerase, FS, according to the manufacturer's directions. The reactions are cycled on a GeneAmp PCR System 9600 as per manufacturer's instructions, except that they are annealed at 20° C. or 30° C. for one minute. Sequencing reactions are ethanol precipitated, pellets are resuspended in 8 microliters of loading buffer, 1.5 microliters is loaded on a sequencing gel, and the data is collected by an ABI PRISM 3700 DNA Sequencer. (Applied Biosystems, Foster City, Calif.).

[0337] The number of times a sequence is represented in a library is determined by performing sequence identity analysis on the cloned cDNA sequences and assigning transcript identity to each isolated clone. First, each sequence is checked to determine if it is a bacterial, ribosomal, or mitochondrial contaminant. Such sequences are excluded from the subsequent analysis. Second, sequence artifacts, such as vector and repetitive elements, are masked and/or removed from each sequence.

[0338] The remaining sequences are compared via BLAST (Altschul et. al, J. Mol. Biol., 215:40, 1990) to GenBank and EST databases for gene identification and are compared with each other via FastA (Pearson & Lipman, PNAS, 85:2444, 1988) to calculate the frequency of cDNA appearance in the normalized cDNA library. The sequences are also searched against the GenBank and GeneSeq nucleotide databases using the BLASTN program (BLASTN 1.3MP: Altschul et al., J. Mol. Bio. 215:403, 1990). Fourth, the sequences are analyzed against a non-redundant protein (NRP) database with the BLASTX program (BLASTX 1.3MP: Altschul et al., supra). This protein database is a combination of the Swiss-Prot, PIR, and NCBI GenPept protein databases. The BLASTX program is run using the default BLOSUM-62 substitution matrix with the filter parameter: “xnu+seg”. The score cutoff utilized is 75. Assembly of overlapping clones into contigs is done using the program Sequencher (Gene Codes Corp.; Ann Arbor, Mich.). The assembled contigs are analyzed using the programs in the GCG package (Genetic Computer Group, University Research Park, 575 Science Drive, Madison, Wis. 53711) Suite Version 10.1.

### Example 4

### Detection of CA-Sequences in Human Cancer Cells and Tissues

[0339] DNA from prostate and breast cancer tissues and other human cancer tissues, human colon, normal human tissues including non-cancerous prostate, and from other human cell lines are extracted following the procedure of Delli Bovi et al. (1986, Cancer Res. 46:6333-6338). The DNA is resuspended in a solution containing 0.05 M Tris HCl buffer, pH 7.8, and 0.1 mM EDTA, and the amount of DNA recovered is determined by microfluorometry using Hoechst 33258 dye. Cesarone, C. et al., Anal Biochem 100:188-197 (1979).

[0340] Polymerase chain reaction (PCR) is performed using Taq polymerase following the conditions recommended by the manufacturer (Perkin Elmer Cetus) with regard to buffer, Mg²⁺, and nucleotide concentrations. Thermocycling is performed in a DNA cycler by denaturation at 94° C. for 3 min. followed by either 35 or 50 cycles of 94° C. for 1.5 min., 50° C. for 2 min. and 72° C. for 3 min. The ability of the PCR to amplify the selected regions of the CA gene is tested by using a cloned CA polynucleotide(s) as a positive template(s). Optimal Mg²⁺, primer concentrations and requirements for the different cycling temperatures are determined with these templates. The master mix recommended by the manufacturer is used. To detect possible contamination of the master mix components, reactions without template are routinely tested.

[0341] Southern blotting and hybridization are performed as described by Southern, E. M., (J. Mol. Biol. 98:503-517, 1975), using the cloned sequences labeled by the random primer procedure (Feinberg, A. P., et al., 1983, Anal. Biochem. 132:6-13). Prehybridization and hybridization are performed in a solution containing 6×SSPE, 5% Denhardt's, 0.5% SDS, 50% formamide, 100 μg/ml denaturated salmon testis DNA, incubated for 18 hrs at 42° C., followed by washings with 2×SSC and 0.5% SDS at room temperature and at 37° C. and finally in 0.1×SSC with 0.5% SDS at 68° C. for 30 min (Sambrook et al., 1989, in “Molecular Cloning: A Laboratory Manual”, Cold Spring Harbor Lab. Press). For paraffin-embedded tissue sections the conditions described by Wright and Manos (1990, in “PCR Protocols”, Innis et al., eds., Academic Press, pp. 153-158) are followed using primers designed to detect a 250 bp sequence.

### Example 5

### Expression of Cloned Polynucleotides in Host Cells

[0342] To study the protein products of CA genes, restriction fragments from CA DNA are cloned into the expression vector pMT2 (Sambrook, et al., Molecular Cloning: A Laboratory Manual, Cold Spring Harbor Laboratory Press pp 16.17-16.22 (1989)) and transfected into COS cells grown in DMEM supplemented with 10% FCS. Transfections are performed employing calcium phosphate techniques (Sambrook, et al (1989) pp. 16.32-16.40, supra) and cell lysates are prepared forty-eight hours after transfection from both transfected and untransfected COS cells. Lysates are subjected to analysis by immunoblotting using anti-peptide antibody.

[0343] In immunoblotting experiments, preparation of cell lysates and electrophoresis are performed according to standard procedures. Protein concentration is determined using BioRad protein assay solutions. After semi-dry electrophoretic transfer to nitrocellulose, the membranes are blocked in 500 mM NaCl, 20 mM Tris, pH 7.5, 0.05% Tween-20 (TTBS) with 5% dry milk. After washing in TTBS and incubation with secondary antibodies (Amersham), enhanced chemiluminescence (ECL) protocols (Amersham) are performed as described by the manufacturer to facilitate detection.

### Example 6

### Generation of Antibodies against Polypeptides

[0344] Polypeptides, unique to CA genes are synthesized or isolated from bacterial or other (e.g., yeast, baculovirus) expression systems and conjugated to rabbit serum albumin (RSA) with m-maleimido benzoic acid N-hydroxysuccinimide ester (MBS) (Pierce, Rockford, Ill.). Immunization protocols with these peptides are performed according to standard methods. Initially, a pre-bleed of the rabbits is performed prior to immunization. The first immunization includes Freund's complete adjuvant and 500 μg conjugated peptide or 100 μg purified peptide. All subsequent immunizations, performed four weeks after the previous injection, include Freund's incomplete adjuvant with the same amount of protein. Bleeds are conducted seven to ten days after the immunizations.

[0345] For affinity purification of the antibodies, the corresponding CA polypeptide is conjugated to RSA with MBS, and coupled to CNBr-activated Sepharose (Pharmacia, Uppsala, Sweden). Antiserum is diluted 10-fold in 10 mM Tris-HCl, pH 7.5, and incubated overnight with the affinity matrix. After washing, bound antibodies are eluted from the resin with 100 mM glycine, pH 2.5.

### Example 7

### Generation of Monoclonal Antibodies Against a CA Polypeptide

[0346] A non-denaturing adjuvant (Ribi, R730, Corixa, Hamilton MT) is rehydrated to 4 ml in phosphate buffered saline. 100μl of this rehydrated adjuvant is then diluted with 400μl of Hank's Balanced Salt Solution and this is then gently mixed with the cell pellet used for immunization. Approximately 500 μg conjugated peptide or 100 μg purified peptide and Freund's complete are injected into Balb/c mice via foot-pad, once a week. After 6 weeks of weekly injection, a drop of blood is drawn from the tail of each immunized animal to test the titer of antibodies against CA polypeptides using FACS analysis. When the titer reaches at least 1:2000, the mice are sacrificed in a CO₂ chamber followed by cervical dislocation. Lymph nodes are harvested for hybridoma preparation. Lymphocytes from mice with the highest titer are fused with the mouse myeloma line X63-Ag8.653 using 35% polyethylene glycol 4000. On day 10 following the fusion, the hybridoma supernatants are screened for the presence of CAP-specific monoclonal antibodies by fluorescence activated cell sorting (FACS). Conditioned medium from each hybridoma is incubated for 30 minutes with a combined aliquot of PC3, Colo-205, LnCap, or Panc-1 cells. After incubation, the cell samples are washed, resuspended in 0.1 ml diluent and incubated with 1 μg/ml of FITC conjugated F(ab′)2 fragment of goat anti-mouse IgG for 30 min at 4° C. The cells are washed, resuspended in 0.5 ml FACS diluent and analyzed using a FACScan cell analyzer (Becton Dickinson; San Jose, Calif.). Hybridoma clones are selected for further expansion, cloning, and characterization based on their binding to the surface of one or more of cell lines which express the CA polypeptide as assessed by FACS. A hybridoma making a monoclonal antibody designated mAbCA which binds an antigen designated Ag-CA.x and an epitope on that antigen designated Ag-CA.x.1 is selected.

### Example 8

### ELISA assay for Detecting CA Related Antigens

[0347] To test blood samples for antibodies that bind specifically to recombinantly produced CA antigens, the following procedure is employed. After a recombinant CA related protein is purified, the recombinant protein is diluted in PBS to a concentration of 5 μg/ml (500 ng/100 μl). 100 microliters of the diluted antigen solution is added to each well of a 96-well Immulon 1 plate (Dynatech Laboratories, Chantilly, Va.), and the plate is then incubated for 1 hour at room temperature, or overnight at 4° C., and washed 3 times with 0.05% Tween 20 in PBS. Blocking to reduce nonspecific binding of antibodies is accomplished by adding to each well 200 μl of a 1% solution of bovine serum albumin in PBS/Tween 20 and incubation for 1 hour. After aspiration of the blocking solution, 100 μl of the primary antibody solution (anticoagulated whole blood, plasma, or serum), diluted in the range of 1/16 to 1/2048 in blocking solution, is added and incubated for 1 hour at room temperature or overnight at 4° C. The wells are then washed 3 times, and 100 μl of goat anti-human IgG antibody conjugated to horseradish peroxidase (Organon Teknika, Durham, N.C.), diluted 1/500 or 1/1000 in PBS/Tween 20, 100 μl of o-phenylenediamine dihydrochloride (OPD, Sigma) solution is added to each well and incubated for 5-15 minutes. The OPD solution is prepared by dissolving a 5 mg OPD tablet in 50 ml 1% methanol in H₂O and adding 50 μl 30% H₂O₂ immediately before use. The reaction is stopped by adding 25 l of 4M H₂SO₄. Absorbances are read at 490 nm in a microplate reader (Bio-Rad).

### Example 9

### Identification and Characterization of CA Antigen on Cancer Cell Surface

[0348] A cell pellet of proximately 25 μl packed cell volume of a cancer cell preparation is lysed by first diluting the cells to 0.5 ml in water followed by freezing and thawing three times. The solution is centrifuged at 14,000 rpm. The resulting pellet, containing the cell membrane fragments, is resuspended in 50 μl of SDS sample buffer (Invitrogen, Carlsbad, Calif.). The sample is heated at 80° C. for 5 minutes and then centrifuged for 2 minutes at 14,000 rpm to remove any insoluble materials.

[0349] The samples are analyzed by Western blot using a 4 to 20% polyacrylamide gradient gel in Tris-Glycine SDS (Invitrogen; Carlsbad Calif.) following the manufacturer's directions. Ten microliters of membrane sample are applied to one lane on the polyacrylamide gel. A separate 10 μL sample is reduced first by the addition of 2 μL of dithiothreitol (100 mM) with heating at 80° C. for 2 minutes and then loaded into another lane. Pre-stained molecular weight markers SeeBlue Plus2 (Invitrogen; Carlsbad, Calif.) are used to assess molecular weight on the gel. The gel proteins are transferred to a nitrocellulose membrane using a transfer buffer of 14.4 g/l glycine, 3 g/l of Tris Base, 10% methanol, and 0.05% SDS. The membranes are blocked, probed with a CAP-specific monoclonal antibody (at a concentration of 0.5 ug/ml), and developed using the Invitrogen WesternBreeze Chromogenic Kit-AntiMouse according to the manufacturer's directions. In the reduced sample of the tumor cell membrane samples, a prominent band is observed migrating at a molecular weight within about 10% of the predicted molecular weight of the corresponding CA protein.

### Example 10

### Preparation of Vaccines

[0350] The present invention also relates to a method of stimulating an immune response against cells that express CA polypeptides in a patient using CA polypeptides of the invention that act as an antigen produced by or associated with a malignant cell. This aspect of the invention provides a method of stimulating an immune response in a human against cancer cells or cells that express CA polynucleotides and polypeptides. The method comprises the step of administering to a human an immunogenic amount of a polypeptide comprising: (a) the amino acid sequence of a huma CA protein or (b) a mutein or variant of a polypeptide comprising the amino acid sequence of a human endogenous retrovirus CA protein.

### Example 11

### Generation of Transgenic Animals Expressing Polypeptides as a Means for Testing Therapeutics

[0351] CA nucleic acids are used to generate genetically modified non-human animals, or site specific gene modifications thereof, in cell lines, for the study of function or regulation of prostate tumor-related genes, or to create animal models of diseases, including prostate cancer. The term “transgenic” is intended to encompass genetically modified animals having an exogenous CA gene(s) that is stably transmitted in the host cells where the gene(s) may be altered in sequence to produce a modified protein, or having an exogenous CA LTR promoter operably linked to a reporter gene. Transgenic animals may be made through a nucleic acid construct randomly integrated into the genome. Vectors for stable integration include plasmids, retroviruses and other animal viruses, YACs, and the like. Of interest are transgenic mammals, e.g. cows, pigs, goats, horses, etc., and particularly rodents, e.g. rats, mice, etc.

[0352] The modified cells or animals are useful in the study of CA gene function and regulation. For example, a series of small deletions and/or substitutions may be made in the CA genes to determine the role of different genes in tumorigenesis. Specific constructs of interest include, but are not limited to, antisense constructs to block CA gene expression, expression of dominant negative CA gene mutations, and over-expression of a CA gene. Expression of a CA gene or variants thereof in cells or tissues where it is not normally expressed or at abnormal times of development is provided. In addition, by providing expression of proteins derived from CA in cells in which it is otherwise not normally produced, changes in cellular behavior can be induced.

[0353] DNA constructs for random integration need not include regions of homology to mediate recombination. Conveniently, markers for positive and negative selection are included. For various techniques for transfecting mammalian cells, see Keown et al., Methods in Enzymology 185:527-537 (1990).

[0354] For embryonic stem (ES) cells, an ES cell line is employed, or embryonic cells are obtained freshly from a host, e.g. mouse, rat, guinea pig, etc. Such cells are grown on an appropriate fibroblast-feeder layer or grown in the presence of appropriate growth factors, such as leukemia inhibiting factor (LIF). When ES cells are transformed, they may be used to produce transgenic animals. After transformation, the cells are plated onto a feeder layer in an appropriate medium. Cells containing the construct may be detected by employing a selective medium. After sufficient time for colonies to grow, they are picked and analyzed for the occurrence of integration of the construct. Those colonies that are positive may then be used for embryo manipulation and blastocyst injection. Blastocysts are obtained from 4 to 6 week old superovulated females. The ES cells are trypsinized, and the modified cells are injected into the blastocoel of the blastocyst. After injection, the blastocysts are returned to each uterine horn of pseudopregnant females. Females are then allowed to go to term and the resulting chimeric animals screened for cells bearing the construct. By providing for a different phenotype of the blastocyst and the ES cells, chimeric progeny can be readily detected.

[0355] The chimeric animals are screened for the presence of the modified gene and males and females having the modification are mated to produce homozygous progeny. If the gene alterations cause lethality at some point in development, tissues or organs are maintained as allogeneic or congenic grafts or transplants, or in in vitro culture. The transgenic animals may be any non-human mammal, such as laboratory animals, domestic animals, etc. The transgenic animals are used in functional studies, drug screening, etc., e.g. to determine the effect of a candidate drug on prostate cancer, to test potential therapeutics or treatment regimens, etc.

### Example 12

### Diagnostic Imaging Using CA Speciflc Antibodies

[0356] The present invention encompasses the use of antibodies to CA polypeptides to accurately stage cancer patients at initial presentation and for early detection of metastatic spread of cancer. Radioimmunoscintigraphy using monoclonal antibodies specific for CA polypeptides can provide an additional cancer-specific diagnostic test. The monoclonal antibodies of the instant invention are used for histopathological diagnosis of carcinomas.

[0357] Subcutaneous human xenografts of cancer cells in nude mice is used to test whether a technetium-99 m (^{99m}Tc)-labeled monoclonal antibody of the invention can successfully image the xenografted cancer by external gamma scintography as described for seminoma cells by Marks, et al., Brit. J. Urol. 75:225 (1995). Each monoclonal antibody specific for a CA polypeptide is purified from ascitic fluid of BALB/c mice bearing hybridoma tumors by affinity chromatography on protein A-Sepharose. Purified antibodies, including control monoclonal antibodies such as an avidin-specific monoclonal antibody (Skea, et al., J. Immunol. 151:3557 (1993)) are labeled with ^{99m}Tc following reduction, using the methods of Mather, et al., J. Nucl. Med. 31:692 (1990) and Zhang et al., Nucl. Med. Biol. 19:607 (1992). Nude mice bearing human cancer cells are injected intraperitoneally with 200-500 μCi of ^{99m}Tc-labeled antibody. Twenty-four hours after injection, images of the mice are obtained using a Siemens ZLC3700 gamma carnera equipped with a 6 mm pinhole collimator set approximately 8 cm from the animal. To determine monoclonal antibody biodistribution following imaging, the normal organs and tumors are removed, weighed, and the radioactivity of the tissues and a sample of the injectate are measured. Additionally, CA-specific antibodies conjugated to antitumor compounds are used for cancer-specific chemotherapy.

### Example 13

### Immunohistochemical Methods

[0358] Frozen tissue samples from cancer patients are embedded in an optimum cutting temperature (OCT) compound and quick-frozen in isopentane with dry ice. Cryosections are cut with a Leica 3050 CM mictrotome at thickness of 5 μm and thaw-mounted on vectabound-coated slides. The sections are fixed with ethanol at −20° C. and allowed to air dry overnight at room temperature. The fixed sections are stored at −80° C. until use. For immunohistochemistry, the tissue sections are retrieved and first incubated in blocking buffer (PBS, 5% normal goat serum, 0.1% Tween 20) for 30 minutes at room temperature, and then incubated with the CA protein-specific monoclonal antibody and control monoclonal antibodies diluted in blocking buffer (1 μg/ml) for 120 minutes. The sections are then washed three times with the blocking buffer. The bound monoclonal antibodies are detected with a goat anti-mouse IgG+IgM (H+L) F(ab′)2-peroxidase conjugates and the peroxidase substrate diaminobenzidine (1 mg/ml, Sigma Catalog No. D 5637) in 0.1 M sodium acetate buffer pH 5.05 and 0.003% hydrogen peroxide (Sigma cat. No. H1009). The stained slides are counter-stained with hematoxylin and examined under Nikon microscope.

[0359] Monoclonal antibody against a CA protein (antigen) is used to test reactivity with various cell lines from different types of tissues. Cells from different established cell lines are removed from the growth surface without using proteases, packed and embedded in OCT compound. The cells are frozen and sectioned, then stained using a standard IHC protocol. The CellArray™ technology is described in WO 01/43869. Normal tissue (human) obtained by surgical resection are frozen and mounted. Cryosections are cut with a Leica 3050 CM mictrotome at thickness of 5 μm and thaw-mounted on vectabound-coated slides. The sections are fixed with ethanol at −20° C. and allowed to air dry overnight at room temperature. PolyMICA™ Detection kit is used to determine binding of a CA-specific monoclonal antibody to normal tissue. Primary monoclonal antibody is used at a final concentration of 1 μg/ml.

[0360] All publications and patent applications cited in this specification are herein incorporated by reference as if each individual publication or patent application were specifically and individually indicated to be incorporated by reference.

[0361] Although the foregoing invention has been described in some detail by way of illustration and example for purposes of clarity of understanding, it will be readily apparent to those of ordinary skill in the art in light of the teachings of this invention that certain changes and modifications may be made thereto without departing from the spirit or scope of the appended claims.

1. An isolated nucleic acid comprising at least 10 contiguous nucleotides of a sequence selected from the group consisting of the polynucleotide sequences of SEQ ID NOS: 5, 7, 9, 11, 17, 19, 25, 31, 37, 43, 45, 55, 57, 59, 61, 63, 69, 71, 73, 75, 81, 89, and 91 shown in Tables 1-10, or its complement.

2. A host cell comprising a recombinant nucleic acid of claim 1.

3. An expression vector comprising the isolated nucleic acid according to claim 1.

4. A host cell comprising the expression vector of claim 3.

5. The polynucleotide according to claim 1, wherein said polynucleotide, or its complement or a fragment thereof, further comprises a detectable label.

6. The polynucleotide according to claim 1, wherein said polynucleotide, or its complement or a fragment thereof, is attached to a solid support.

7. The polynucleotide according to claim 1, wherein said polynucleotide, or its complement or a fragment thereof, is prepared at least in part by chemical synthesis.

8. The polynucleotide according to claim 1, wherein said polynucleotide, or its complement or a fragment thereof, is an antisense fragment.

9. The polynucleotide according to claim 1, wherein said polynucleotide, or its complement or a fragment thereof, is single stranded.

10. The polynucleotide according to claim 1, wherein said polynucleotide, or its complement or a fragment thereof, is double stranded.

11. The polynucleotide according to claim 1, comprising at least 15 contiguous nucleotides.

12. The polynucleotide according to claim 1, comprising at least 20 contiguous nucleotides.

13. A microarray for detecting a cancer associated (CA) nucleic acid comprising:
at least one probe comprising at least 10 contiguous nucleotides of a sequence selected from the group consisting of the polynucleotide sequences SEQ ID NOS: 5, 7, 9, 11, 17, 19, 25, 31, 37, 43, 45, 55, 57, 59, 61, 63, 69, 71, 73, 75, 81, 89, and91 shown in Tables 1-10, or its complement.

14. The microarray according to claim 13, comprising at least 15 contiguous nucleotides.

15. The microarray according to claim 13, comprising at least 20 contiguous nucleotides.

16. An isolated polypeptide, encoded within an open reading frame of a CA sequence selected from the group consisting of the polynucleotide sequences of SEQ ID NOS: 4, 16, 24, 30, 36, 42, 54, 68, 80, and 88 shown in Tables 1-10, or its complement.

17. The polypeptide of claim 16, wherein said polypeptide comprises the amino acid sequence encoded by a polynucleotide selected from the group consisting of SEQ ID NOS: 5, 7, 9, 11, 17, 19, 25, 31, 37, 43, 45, 55, 57, 59, 61, 63, 69, 71, 73, 75, 81, 89, and 91 shown in Tables 1-10.

18. The polypeptide of claim 16, wherein said polypeptide comprises the amino acid sequence encoded by a polypeptide selected from the group consisting of SEQ ID NOS: 6, 8, 10, 12, 18, 20, 26, 32, 38, 44, 46, 56, 58, 60, 62, 64, 70, 72, 74, 76, 82, 90, and 92 shown in Tables 1-10.

19. The polypeptide of claim 16, wherein said polypeptide comprises the amino acid sequence of an epitope of the amino acid sequence of a CA polypeptide selected from the group consisting of SEQ ID NOS: 6, 8, 10, 12, 18, 20, 26, 32, 38, 44, 46, 56, 58, 60, 62, 64, 70, 72, 74, 76, 82, 90, and 92 shown in Tables 1-10.

20. The polypeptide of claim 16, wherein said polypeptide is expressed on a cell surface, wherein the CA protein selected from the group consisting of SEQ ID NOS: 6, 8, 10, 12, 18, 20, 26, 32, 38, 44, 46, 56, 58, 60, 62, 64, 70, 72, 74, 76, 82, 90, and 92.

21. The polypeptide of claim 16, wherein said polypeptide or fragment thereof is attached to a solid support.

22. An isolated antibody or antigen binding fragment thereof, that binds to a polypeptide according to any one of claims 16-20.

23. The isolated antibody or antigen binding fragment thereof according the claim 22, wherein said antibody or fragment thereof is attached to a solid support.

24. The isolated antibody or antigen binding fragment thereof according the claim 22, wherein said antibody is a monoclonal antibody.

25. The isolated antibody or antigen binding fragment thereof according the claim 22, wherein said antibody is a polyclonal antibody.

26. The isolated antibody or antigen binding fragment thereof according the claim 22, wherein said antibody or fragment thereof further comprises a detectable label.

27. An isolated antibody that binds to a polypeptide, or antigen binding fragment thereof, according to any of claims 16-20, prepared by a method comprising the steps of:
(i) immunizing a host animal with a composition comprising said polypeptide, or antigen binding fragment thereof, and (ii) collecting cells from said host expressing antibodies against the antigen or antigen binding fragment thereof.

28. The monoclonal antibody according to claim 24, wherein the monoclonal antibody binds to the extracellular domain of the CA protein.

29. The monoclonal antibody according to claim 24, wherein the monoclonal antibody binds to at least one human cancer cell line.

30. The monoclonal antibody according to claim 24, wherein the monoclonal antibody is prepared by a process comprising:
(a) providing a hybridoma capable of producing the monoclonal antibody; and
(b) culturing the hybridoma under conditions that provide for the production of the monoclonal antibody by the hybridoma.

31. A hybridoma that produces the monoclonal antibody according to claim 24.

32. The antibody according to claim 22, wherein the antibody is a humanized antibody.

33. The antibody according to claim 22, wherein the CAP is expressed on a cancer cell surface but not on a normal cell surface.

34. The antibody according to claim 22, wherein the CAP is differentially expressed on a cancer cell surface relative to a normal cell surface.

35. The antibody according to claim 22, wherein the antibody is linked to a therapeutic agent.

36. The antibody according to claim 24, wherein the antibody is linked to a therapeutic agent.

37. A pharmaceutical composition comprising the antibody according to claim 22 and a pharmaceutically acceptable excipient.

38. A pharmaceutical composition comprising the antibody according to claim 35 and a pharmaceutically acceptable excipient.

39. A pharmaceutical composition comprising the antibody according to claim 36 and a pharmaceutically acceptable excipient.

40. A kit for detecting cancer cells comprising the antibody according to claim 22.

41. A kit for detecting cancer cells comprising the monoclonal antibody according to claim 24.

42. A method for detecting a presence or an absence of cancer cells in an individual, the method comprising:
contacting cells from the individual with the antibody according to any of claims 22 or 24;
and detecting a complex of a CAP from the cancer cells and the antibody,
wherein detection of the complex correlates with the presence of cancer cells in the individual.

43. A method for inhibiting growth of cancer cells in an individual, the method comprising: administering to the individual an effective amount of a pharmaceutical composition according to any of claims 37, 38, or 39.

44. A method for delivering a therapeutic agent to cancer cells in an individual, the method comprising: administering to the individual an effective amount of a pharmaceutical composition according to any of claims 37, 38, or 39.

45. A kit for diagnosing the presence of cancer in a test sample, said kit comprising at least one polynucleotide that selectively hybridizes to a CA polynucleotide sequence selected from the group consisting of the polynucleotide sequences SEQ ID NOS: 4, 16, 24, 30, 36, 42, 54, 68, 80, and 88 shown in Tables 1-10, or its complement.

46. A kit for diagnosing the presence of cancer in a test sample, said kit comprising at least one polynucleotide that selectively hybridizes to the sequence of a polynucleotide sequence selected from the group consisting of the polynucleotide sequences SEQ ID NOS: 5, 7, 9, 11, 17, 19, 25, 31, 37, 43, 45, 55, 57, 59, 61, 63, 69, 71, 73, 75, 81, 89, and 91 shown in Tables 1-10, a fragment thereof, or their complement.

47. An electronic library comprising a polynucleotide, or fragment thereof, comprising a CA polynucleotide sequence selected from the group consisting of the polynucleotide sequences of SEQ ID NOS: 4, 16, 24, 30, 36, 42, 54, 68, 80, and 88 shown in Tables 1-10, or its complement.

48. An electronic library comprising a polynucleotide, or fragment thereof, comprising a CA polynucleotide sequence selected from the group consisting of the polynucleotide sequences of SEQ ID NOS: 5, 7, 9, 11, 17, 19, 25, 31, 37, 43, 45, 55, 57, 59, 61, 63, 69, 71, 73, 75, 81, 89, and 91 shown in Tables 1-10.

49. An electronic library comprising a polypeptide, or fragment thereof, comprising a CA polypeptide sequence selected from the group consisting of the polypeptide sequences of SEQ ID NOS: 6, 8, 10, 12, 18, 20, 26, 32, 38, 44, 46, 56, 58, 60, 62, 64, 70, 72, 74, 76, 82, 90, and 92 shown in Tables 1-10.

50. A method of screening for anticancer activity comprising:
(a) providing a cell that expresses a cancer associated (CA) gene encoded by a nucleic acid sequence selected from the group consisting of the sequences SEQ ID NOS: 4, 16, 24, 30, 36, 42, 54, 68, 80, and 88 shown in Tables 1-10, or fragment thereof;
(b) contacting a tissue sample derived from a cancer cell with an anticancer drug candidate; and
(c) monitoring an effect of the anticancer drug candidate on an expression of the CA polynucleotide in the tissue sample.

51. The method of screening for anticancer activity according to claim 50, wherein the CA gene comprises at least one nucleic acid sequence selected from the group consisting of the sequences SEQ ID NOS: 5, 7, 9, 11, 17, 19, 25, 31, 37, 43, 45, 55, 57, 59, 61, 63, 69, 71, 73, 75, 81, 89, and 91 shown in Tables 1-10.

52. The method of screening for anticancer activity according to claim 50, further comprising:
(d) comparing the level of expression in the absence of said drug candidate to the level of expression in the presence of the drug candidate.

53. The method of screening for anticancer activity according to claim 51, wherein the drug candidate is an inhibitor of transcription and further wherein the nucleic acid sequence is selected from the group consisting of SEQ ID NOS: 5, 7, 9, 11, 17, 19, 25, 31, 37, 43, 45, 55, 57, 59, 61, 63, 69, 71, 73, 75, 81, 89, and 91 shown in Tables 1-10.

54. A method for detecting cancer associated with expression of a polypeptide in a test cell sample, comprising the steps of:
(i) detecting a level of expression of at least one polypeptide selected from the group consisting of SEQ ID NOS: 6, 8, 10, 12, 18, 20, 26, 32, 38, 44, 46, 56, 58, 60, 62, 64, 70, 72, 74, 76, 82, 90, and 92 shown in Tables 1-10, or a fragment thereof; and
(ii) comparing the level of expression of the polypeptide in the test sample with a level of expression of polypeptide in a normal cell sample, wherein an altered level of expression of the polypeptide in the test cell sample relative to the level of polypeptide expression in the normal cell sample is indicative of the presence of cancer in the test cell sample.

55. A method for detecting cancer associated with expression of a polypeptide in a test cell sample, comprising the steps of:
(i) detecting a level of activity of at least one polypeptide selected from the group consisting of SEQ ID NOS: 6, 8, 10, 12, 18, 20, 26, 32, 38, 44, 46, 56, 58, 60, 62, 64, 70, 72, 74, 76, 82, 90, and 92 shown in Tables 1-10, or a fragment thereof, wherein said activity corresponds to at least one activity for the polypeptide listed in Table 12; and
(ii) comparing the level of activity of the polypeptide in the test sample with a level of activity of polypeptide in a normal cell sample, wherein an altered level of activity of the polypeptide in the test cell sample relative to the level of polypeptide activity in the normal cell sample is indicative of the presence of cancer in the test cell sample.

56. A method for detecting cancer associated with the presence of an antibody in a test serum sample, comprising the steps of:
(i) detecting a level of an antibody against an antigenic polypeptide selected from the group consisting of SEQ ID NOS: 6, 8, 10, 12, 18, 20, 26, 32, 38, 44, 46, 56, 58, 60, 62, 64, 70, 72, 74, 76, 82, 90, and 92 shown in Tables 1-10, or antigenic fragment thereof, and
(ii) comparing said level of said antibody in the test sample with a level of said antibody in the control sample, wherein an altered level of antibody in said test sample relative to the level of antibody in the control sample is indicative of the presence of cancer in the test serum sample.

57. A method for screening for a bioactive agent capable of modulating the activity of a CA protein (CAP), wherein said CAP is encoded by a nucleic acid comprising a nucleic acid sequence selected from the group consisting of the polynucleotide sequences SEQ ID NOS: 5, 7, 9, 11, 17, 19, 25, 31, 37, 43, 45, 55, 57, 59, 61, 63, 69, 71, 73, 75, 81, 89, and 91 shown in Tables 1-10, said method comprising:
a) combining said CAP and a candidate bioactive agent; and
b) determining the effect of the candidate agent on the bioactivity of said CAP.

58. The method of screening for the bioactive agent according to claim 57, wherein the bioactive agent affects the expression of the CA protein (CAP).

59. The method of screening for the bioactive agent according to claim 57, wherein the bioactive agent affects the activity of the CA protein (CAP), wherein such activity is selected from the activities listed in Table 12.

60. The method of screening for the bioactive agent according to claim 57, wherein the bioactive agent is a modulator of an activity selected from the group consisting of: cell adhesion, ion transport, signalling, cell cycle regulation, serine protease inhibitor, guanylate cyclase, and major histocompatibility antigen.

61. A method for diagnosing cancer comprising:
a) determining the expression of one or more genes comprising a nucleic acid sequence selected from the group consisting of the human genomic and mRNA sequences outlined in Tables 1-10, in a first tissue type of a first individual; and
b) comparing said expression of said gene(s) from a second normal tissue type from said first individual or a second unaffected individual;
wherein a difference in said expression indicates that the first individual has cancer.

62. A method for treating cancers comprising administering to a patient an inhibitor of a CA protein (CAP), wherein said CAP is encoded by a nucleic acid comprising a nucleic acid sequence selected from the group consisting of the human nucleic acid sequences in Tables 1-10.

63. The method for treating cancers according to claim 62, wherein the inhibitor of a CA protein (CAP) binds to the CA protein.

64. The method for treating cancers according to claim 62, wherein the inhibitor is a signalling protein antagonist and further wherein the CAP sequence is selected from the group consisting of SEQ ID NOS: 6, 8, 10, 12, 32, 38, 38, 90 and 92 shown in Tables 1-10.

65. The method for treating cancers according to claim 62, wherein the inhibitor is a cell adhesion protein antagonist and further wherein the CAP sequence is selected from the group consisting of SEQ ID NOS: 6, 8, 10, 12, 44, 46 and 82 shown in Tables 1-10.

66. The method for treating cancers according to claim 62, wherein the inhibitor is a serine protease inhibitor antagonist and further wherein the CAP sequence is selected from the group consisting of SEQ ID NOS: 18 and 20 shown in Tables 1-10.

67. The method for treating cancers according to claim 62, wherein the inhibitor of a CA protein (CAP) is a nucleic acid binding protein antagonist and further wherein the CAP sequence is selected from the group consisting of SEQ ID NOS: 52, 54, 165, 171 and 173 shown in Tables 1-10.

68. The method for treating cancers according to claim 62, wherein the inhibitor is a is an ion transport protein antagonist and further wherein the CAP sequence is selected from the group consisting of SEQ ID NOS: 56, 58, 60, 62 and 64 shown in Tables 1-10.

69. The method for treating cancers according to claim 62, wherein the inhibitor is a major histocompatility antigen antagonist and further wherein the CAP sequence is selected from the group consisting of SEQ ID NOS: 70, 72, 74 and 76 shown in Tables 1-10.

70. A method for inhibiting expression of a cancer associated (CA) gene in a cell comprising:
contacting a cell expressing a CA gene with a double stranded RNA comprising a sequence capable of hybridizing to a cancer associated (CA) mRNA corresponding to the polynucleotide sequences of SEQ ID NOS: 5, 7, 9, 11, 17, 19, 25, 31, 37, 43, 45, 55, 57, 59, 61, 63, 69, 71, 73, 75, 81, 89, and 91 shown in Tables 1-10, in an amount sufficient to elicit RNA interference; and
inhibiting expression of the CA gene in the cell.

71. The method of claim 70, wherein the double stranded RNA is provided by introducing a short interfering RNA (siRNA) into the cell by a method selected from the group consisting of transfection, electroporation, and microinjection.

72. The method of claim 70, wherein the double stranded RNA is provided by introducing a short interfering RNA (siRNA) into the cell by an expression vector.

The application's sequence listing, which the Patent Office published only in electronic form, follows.

SEQUENCE LISTING (92 sequences)

SEQ ID NO: 1 - DNA, 10241 bp, Mus musculus
ctccctccagcctctttcatctgaaccgtggcgcgctcgtgcctctagttaatcagccttccaagccacaccaagagtcatttcccgggggtaggctctgctggagcctggaaactaggagctgcctgcagtcttggggtctcctctgcctgtgagctgctccttccagtccaagggttagggccagaaaggaggacaactttggagtcaaaagactgaccactgtggttagcacctgagagaaccttcagtttcttctcttgctacgccacccccttcgggtacaagtcccaaaatggtttgccagttttcgttcccgtaactggagcgtggggaagcccctcaacccttccagagagcccatcccgcctcaggacttgaaggcacacttcaccaggtgagtgcagttcgtgcagttcccggtggcaacgcctggagtccctcccccgccccccaccccgccccctccccgcctccggccgctgtggcgcagaccttgactcacgagctgcaagagtcgtaaagggtccccaagcctcagtgccgggtaagcaaggcagcgggtcgcagccccctcctgggcgggccttcgcgtcccgcccccggccaccactcgacaccctctgcctgacgtcaaggggttgggggcggagagcggcggtggcggcggctgcagcggagaaagaaccggcgcccggcgcggtggagcgccgaatccgagctcaggggcgccgagagccgtgctgagaccgaggggcggtggcacgggacagccttagcgtgctggcgggcgggcgcagtctggagcggcgcgggggcaggggaggacggtggccggagtcaaacgcgagggcagcgcccagggattggagctgcacgaaagaggtgagtgaggccggagcggtggggccccggggccgctgctttgtccccttgcttgggtaggggctagcgcgcgcgctagaggacagcgtctaggggtgcagggcggggcgacagcaaagacagctgtccgatccgggtccctcttgagtccgccgcgggctgcccagtggcgatcggcatcaaggcaagcagtgcctgcagctccactggccggagcagcgggagcctgggggtacggacagcgctaggggcagtgggggacccttgggctgtccagcgcgcggtccgaatctttgccaggctcgcgaactgctcgggttccccccacctcgacggaaagttaggggcgggcttggaccgtggccgatgttgtgggatcggatttccctagcgcggccccccgccctcccgttctgctccggaggcgggctggcactgagaaccagccccctagccaaagctccgccgcccggtccctctctggagcgccgcaatccacgaccgggtgtgcaagtgtggggtgcaaatcctggtcctgcacccctccatccccttggctgtccgtgtcccttgcttcgggaagagcttgggggttgggtcaccgctacgcctgcagattctcggagcgcaccaccgggttttgaccccagcctagggtaattggcagagaggaaactgagggtgtgtcaggggggactgctccggggaaggcagccccagccccccgcccttcccgcgcggaggttcttggccgacagggggcgtccgcaagcccggctttgccacgctcccagcgctgccgctttgtttgcattcaaatccccggagctgggggaggggagagtccacagtagggagaccgagaccgggtcttggctaggaacctttgttttggggtgcaatcctcagattctgcatctctgttcccagcccctagcgtctagattagtggagatccgttccgtttgcctactgcctagtgcatggtccccgaggtgcaatcccggagttaagaacgttcgtcagagccggggaggaggggacgcagcccttgacgatcatttgtgggcatcccctgttgtccaggagaaccccgcttcggcctccccaacccatttcacttccctccacgatcccgctctcgcggaggcgaggagattcccagacagaagcctggaactgactcgtggcccggtcgcctctctgcgggagggtcagtgtcttgtagaaggctgttggagaaacaggactggtcctggtcatttccacgcccatcccacccacttcctgcctccctcttgggcaacaaaggggcctcggaagctgggcccatttggttcccggccccactcctactccagccctgctgatgtggaaccgggtttgggctctgcccggctattgtctgcgctgggggaggggacgggctggggccgggaactctacacgctgcctgcttcaccaagtcccccactgaagctctttgcccaaccggctgcctgcggctgctgaataaggggtatatctccccgaattaggtcttggggctggcctgggtcccactggtagcaagccctgttttttatggttattgtaagaaactctgaaacctttaaggccagaaggagccaatgagggggagtccctcttttatttttttccacacaactccctgttgaagggagggagtagggatggcctggaggccacaggcggcttttgatgactgcccacgcctagtgcttgctgactaagttcctctccttgctcttctgggagacccccagggctcttgtgggcagaggccagttgcaggatcaggaggagatgtaaaggctctgggggaggtttgttccagtgtgcgtcctgtgttgcttgtctcttggtgcgggcccccttccggtctgtgatgctgaccagtttcttttccttcagcagggctgctggactgaagtttagaccctgggtgtctgccatggccccacactgggctgtctggctgctggcagcagggctgtggggcctgggcatcggggctgagatgtggtggaaccttgtgccccggaagacagtatcttctgggggtgagtgcctgaagcatgggaggcagggccagagggaggctgggatagactgctgggggaagggcgaggaggggagtgatgcttgcttgcaggaaggagctgctgctgaggaattacccccaagcatgcacctttacaccgatatgtgtggctgtggctttctaagaaacgcgagtggccccaggggcccagaactggtagtgctggtctagacctgggctttgcccccttctgacactgggataactttatgggatctcttaccagcgcacccccaccctcacccagacctggctggcctggtgtgcaagggaggtagtttctgaatcaacctccctgttcctcacttgaattgtctctcttgcttggaagcctagagagagaaacctgaaccccagggcaagtgtaaacctaaccctatctccagtctttctagctgtctgtccctagaagcccctttaattcaccctaatggtctcctctgctgctctaacactggagccttctgatggctctgggtggacacatataagctcgcgcttcgtgggggaggagacagagtgaaccagacagctctcctttgctttcgcgcacacctgtatggagaggtgatgtcaggtgtttgtatcatctctgtgctcctgggacatgggatgagctcacctcccacaggctacactcagctgctattaaagcccctcccatgtcgacccaactctcgttggtcactgcctcccgaccctgaagctggcttaagtagggatcctgtgaacaggtgtgcaggtatacggtcctctgacaggttacatgactgtatgtatgatcacgccctacgtgtgctggccggaagcacaacttcccaggcttcagcaccacctctgagtctcaggttccttttatctcccagtcctaacctcttcttccttctccacacgccactttgccagtcccctgcccatctgtgcgtgtgtctctgaaagcctggattggtgcctgctgggacttcttagacaaggaatgcttacaactattctgtgcctcctgatgcagtaaatccgccaccagggtctgcctagaccttgccatggtcagcaagtagcagagcaggaaatggcaaccgaggaagcggggctgggggtgggggggaagtgtccagttctgtgcctgaggtaccgctgaccctgagggagcgtcatcagtcagatggcttcctctggccggaagctttggctgaggtatccttccttccccgttaccagcccagattacctcctcccaggctgaggaagggccttggaagcctgggtaggatggagctgttgagccaaaggctattcagaaaaagtcctttatggcccatagaggtttggttgtcgtctgtgtgtgtgtagtggtagcttttgtggagaatcgtgatgacgaggcccaggggagccttggacaaaggaagattgatggattcctggaaccccagggaggatgtcctctgcccctactcatccccaccttgttctaatatctgtttctgcagagctggtcacagtagtgaggcggttctcccagacaggcatccaggacttcctgacactgaccctgacagaacattctggccttttatatgtgggggcccgagaggcgctgtttgccttcagtgtagaggctctggagctgcaaggagcggtgagaggtggggcagtgggaggcactcagaggggagagggaaaggactcagggtgtagcctgtgcaggctgtccctcagcccagctctcttggggtgtcaagattagcaattgctttctgctcctggtttctgctagttggggtggtttggggcttctgtcagaatggggaccaggcgtcatcaatggtgtagcttaaggggtgtttgcagcacacttagcgcagacctgtgacattgctgatgtgtctgtccaatcctcagatctcttgggaggctccagctgagaagaaaattgaatgtacccagaaagggaagagcaaccaggtgggtgcttagagagcttcccctgccagcctccttctttaatctgcaccctggtgatctcctatctctgactctcagttctcactaacctgtatacctttctctccaaagaccgaatgcttcaacttcatccgcttccttcagccatacaattcctcccatctgtatgtctgcggcacctatgccttccagcccaagtgcacctacatcgtgagtggttccccctctctttgggtgtgccccttacccacctgttcctaacctatgacctccttccttgacctctcggggccatgatattttcagactgtatagagccccatagtaacacccatcttcgatgtcttcctgcccctagaacatgctcacgttcaccttggaccgtgcagaatttgaggatgggaagggtaaatgcccatatgacccagctaagggtcacaccggactccttgtgggtgagtggctgctgccagcacagaggggagaatctgggcctctgtcagtcacgctctgagtacttgtcttcagagcagtctctactttagttccctggcctctctgaccgctgttgtctcccgcagacggtgagctgtactcagccacactcaataacttcctgggcacagagccggttatccttcgatacatggggacccaccactccatcaagacagagtacctggctttttggctgaatggtgagtcatgggatgggactggggaagcccagagtggaagggccttccagggccctgggactcttgtcactggcccttttttcttcgtcccagaaccccactttgtaggctctgcctttgtccctgagagtgtgggaagcttcacgggagacgatgacaagatctacttcttcttcagtgagcgggcagtggagtatgactgctattccgagcaggtggtggctcgtgtggcgagagtctgtaaggtaccaagttccgcagtggtgggcagcgggagccctgaaggcctggcaggggctgaccagccttgtctccttgccatctgccagggtgacatggggggagcacggacgctgcagaagaaatggacgacgttcctgaaggctcggttggtgtgctcagcccctgactggaaggtctacttcaaccagctgaaggcggtgcacaccctgcggggcgcctcttggcacaacaccaccttcttcggggtttttcaagcgcgatggtaagcggctatggggtagctgggggtagggaggagcaggtggtcaggtagggatagtgtgtgggtgtgagggcccccgcacaggcgtctggaggaagtccagcgggtcagtgcctggcagccaagatgactttgcgcctgctctttctaaagctgggtgggggaaggtgagcagaaagctgcctggggtgacacctcagggctacctcatggtcgtgactgctccatactaagctttgcccttcctactttttcctctgttccctggtatggtgggagcaagtaggcacccaacctgacttccaaggtccttctttaacaggggcgatatggacctgtctgcagtttgtgagtaccagttggaacagatccagcaagtgtttgagggtccctacaaggagtacagtgagcaagcccagaagtgggcccgctatactgacccggtacccagccctcggcctggttcggtgagttttcggcttggggatgtattcccaacatcggctccaggacccacttattcgccagctgactgacagccgccctccccacgcccctccccgacacagtgtatcaacaactggcaccgagacaatggctacaccagttccctggaactgccggacaacaccctcaacttcatcaagaagcaccccctgatggaggaccaggtgaagcctcggttgggccgccccctacttgtgaagaagaacactaacttcacacacgtggtggccgacagggtcccagggcttgatggtgccacctatacagtgttgttcattggtacaggtaggcgcttcaggtgtgcccaaggctgggaacctggggaggccccatagcctgattcctcatttgcatattcccatcacctctccaggagatggctggctgctgaaggctgtgagcctggggccctggatccacatggtggaggaactgcaggtgtttgaccaggagccagtggaaagtctggtgctgtctcagagcaaggtagtaagactgggccacacgcacctccctctctgttctctgctccattgtctatctggcgcccaggctctatgccatccatagttgggctcatgtagctctcgagttcccagaagtaagagatctaaggtggccagaacctgtcctctgaaggttctcttatagagccagtccctgtggggcccccattcccagaatccagccttggcaaactccttccaagtggggctgcagctctatctgcagtctcttctcggtcaagatgttttggtacccaagcaacagagacatccgatttctttgagtccctagtgggtgtctgagccaggccctcagtctccgggctcatttaagtgttcacgttttttcttttctttctttctttctttttttaacacctttatgcaaaactcatattcgcatcaccctctggattctgatttgcttgccctttaccagctactatgactcaaagttgctccctacaacgctgaataatgagatggcagcaagggaattgtggggctgagcaagcatgcagattggcagtcaccattcaaacagaggaaccccaccttccataggcactgctgtcactgtgctggctccgggggccgggggaaactgagtttcctggcccgagtgtgagcaagtgagcgtacgcctcagcctcacgggtctgccgtccgtccctgtctaagaaggtcatgtctgtaaagtgattaggattttgatggcttgtcgtaagccctcatcaaaattgttcctctggcctggatttttcttccgctgcctttttcttccttgggggacctagtatgtttatgctctctgaacaaatctcagccatcaccccgaggcgtggtgtggcttaccctgtgctttgttttactgtagaaggtgctctttgctggctcccgctctcagctggttcagctgtctctggccgactgcacaaagtaccgtttctgtgtagactgtgtcctggccagggacccttactgtgcctggaatgtcaacaccagccgctgtgtggccaccaccagtggtcgctcggggtgagtcagtcgtctctgagtgccagggccaggagggggaggctaaggtgattggagttggatctctgatgccacttctcttccctaccaggtcctttctggtccaacatgtggcgaacttggacacttcaaagatgtgtaaccagtatggcattaaaaaaggtgagctgttttccttttgttccctcattttgaggatgggcccctggatcacagccagagttagtttatcacctctcactgtgggacctggggttcctgcattaacactgggttctctctcatttctgcctctgcagtcagatctattcccaagaacatcaccgttgtgtcaggcacagacctggtcctaccctgccacctctcgtccaatttggcccatgcccactggaccttcggaagccaggacctgcctgcagaacaacctggctcctttctttatgacacgggactccaggcgctggtggtgatggccgcacagtcccgtcactctggaccctatcgttgctattcagaggagcaggggacaagactggctgcagaaagctaccttgttgctgtcgtggccggctcgtcggtgacactggaggcacgggctcccttggaaaacctggggctcgtgtggctcgctgtggtggccctgggggctgtgtgcctggtgctgctgctgctggtcctatcgctccgccggcgacttcgagaagagctagaaaagggtgccaaggcatctgagaggacactggtgtaccccttggaactgcccaaggagcctgccagtccccccttccgtcctggccccgaaactgatgagaaactttgggatcctgtcgggtactactattcggatggctctctcaagattgtgcctggtcacgcccggtgccagcctgggggtgggcccccttccccacctcctggcatacctggccagcctctgccttctccaactcggctccacctaggaggtggtcggaactcaaatgccaatggttatgtgcgtttacagttgggcggagaggaccgaggaggatctgggcacccactgcctgagctcgcggatgaattacgacggaaactacaacagcgccagccgctgcctgactccaacccagaggagtcttcagtatgaggggacccccccacctcattggcggggggggtctcatgggaggtgcactcttaacttttgcacaggcaccagctacctcagggacatggcaggggcacttgctctgcctgggacagacactgcccagcatttgcccggccgtgaggacctgctcagcatgggcactgccacttggtgtggctcaccaggacttcagcctcacaggagacacaccctcctctgtgaatttgagacatgtgggaccccagcagccaaaactttgcaaggaagaggtttcaagatgtgggcgtgtttgtgcatatatgtgttggtatgcatgtggaagaatgtgtgtgtgtgtgtgtgtgtgttgtaactttcctgtctctatcacgtcttcccttggcctggggtcctcctggttgagtctttggagctatgaaggggaagggggtcatagcactttgcttctcctacccccagctgtcccaagctttggggcagtgatgtacatacggggaagggaaggacagggtgttgtaccccttttgggggagtgcgggactcgggggtgggcctagccctgctcctagggctgtgaatgttttcagggcgggggttgggggtggagatggaacctcctgcttcagggggaggggtgggcagggcctcccacttgccctccgggttcggtggtattttatatttgcgctcttctgacagggctgggaagggttgttgggggagggaagggaggaggtgggcatgctatggatactggcctatcctctccctgctctgggaaaagggctaacagtgtaacttattgtgtccccacatatttatttgttgtaaatatttgagtatttttatattgacaaataaaatggagaaaatgaaattt

SEQ ID NO: 2 - DNA, 4228 bp, Mus musculus
ctccctccagcctctttcatctgaaccgtggcgcgctcgtgcctctagttaatcagccttccaagccacaccaagagtcatttcccgggggtaggctctgctggagcctggaaactaggagctgcctgcagtcttggggtctcctctgcctgtgagctgctccttccagtccaagggttagggccagaaaggaggacaactttggagtcaaaagactgaccactgtggttagcacctgagagaaccttcagtttcttctcttgctacgccacccccttcgggtacaagtcccaaaatggtttgccagttttcgttcccgtaactggagcgtggggaagcccctcaacccttccagagagcccatcccgcctcaggacttgaaggcacacttcaccaggtgagtgcagttcgtgcagttcccggtggcaacgcctggagtccctcccccgccccccaccccgccccctccccgcctccggccgctgtggcgcagaccttgactcacgagctgcaagagtcgtaaagggtccccaagcctcagtgccgggtaagcaaggggttgggggcggagagcggcggtggcggcggctgcagcggagaaagaaccggcgcccggcgcggtggagcgccgaatccgagctcaggggcgccgagagccgtgctgagaccgaggggcggtggcacgggacagccttagcgtgctggcgggcgggcgcagtctggagcggcgcgggggcaggggaggacggtggccggagtcaaacgcgagggcagcgcccagggattggagctgcacgaaagagggctgctggactgaagtttagaccctgggtgtctgccatggccccacactgggctgtctggctgctggcagcagggctgtggggcctgggcatcggggctgagatgtggtggaaccttgtgccccggaagacagtatcttctggggagctggtcacagtagtgaggcggttctcccagacaggcatccaggacttcctgacactgaccctgacagaacattctggccttttatatgtgggggcccgagaggcgctgtttgccttcagtgtagaggctctggagctgcaaggagcgatctcttgggaggctccagctgagaagaaaattgaatgtacccagaaagggaagagcaaccagaccgaatgcttcaacttcatccgcttccttcagccatacaattcctcccatctgtatgtctgcggcacctatgccttccagcccaagtgcacctacatcaacatgctcacgttcaccttggaccgtgcagaatttgaggatgggaagggtaaatgcccatatgacccagctaagggtcacaccggactccttgtggacggtgagctgtactcagccacactcaataacttcctgggcacagagccggttatccttcgatacatggggacccaccactccatcaagacagagtacctggctttttggctgaatgaaccccactttgtaggctctgcctttgtccctgagagtgtgggaagcttcacgggagacgatgacaagatctacttcttcttcagtgagcgggcagtggagtatgactgctattccgagcaggtggtggctcgtgtggcgagagtctgtaagggtgacatggggggagcacggacgctgcagaagaaatggacgacgttcctgaaggctcggttggtgtgctcagcccctgactggaaggtctacttcaaccagctgaaggcggtgcacaccctgcggggcgcctcttggcacaacaccaccttcttcggggtttttcaagcgcgatggggcgatatggacctgtctgcagtttgtgagtaccagttggaacagatccagcaagtgtttgagggtccctacaaggagtacagtgagcaagcccagaagtgggcccgctatactgacccggtacccagccctcggcctggttcgtgtatcaacaactggcaccgagacaatggctacaccagttccctggaactgccggacaacaccctcaacttcatcaagaagcaccccctgatggaggaccaggtgaagcctcggttgggccgccccctacttgtgaagaagaacactaacttcacacacgtggtggccgacagggtcccagggcttgatggtgccacctatacagtgttgttcattggtacaggagatggctggctgctgaaggctgtgagcctggggccctggatccacatggtggaggaactgcaggtgtttgaccaggagccagtggaaagtctggtgctgtctcagagcaagaaggtgctctttgctggctcccgctctcagctggttcagctgtctctggccgactgcacaaagtaccgtttctgtgtagactgtgtcctggccagggacccttactgtgcctggaatgtcaacaccagccgctgtgtggccaccaccagtggtcgctcggggtcctttctggtccaacatgtggcgaacttggacacttcaaagatgtgtaaccagtatggcattaaaaaagtcagatctattcccaagaacatcaccgttgtgtcaggcacagacctggtcctaccctgccacctctcgtccaatttggcccatgcccactggaccttcggaagccaggacctgcctgcagaacaacctggctcctttctttatgacacgggactccaggcgctggtggtgatggccgcacagtcccgtcactctggaccctatcgttgctattcagaggagcaggggacaagactggctgcagaaagctaccttgttgctgtcgtggccggctcgtcggtgacactggaggcacgggctcccttggaaaacctggggctcgtgtggctcgctgtggtggccctgggggctgtgtgcctggtgctgctgctgctggtcctatcgctccgccggcgacttcgagaagagctagaaaagggtgccaaggcatctgagaggacactggtgtaccccttggaactgcccaaggagcctgccagtccccccttccgtcctggccccgaaactgatgagaaactttgggatcctgtcgggtactactattcggatggctctctcaagattgtgcctggtcacgcccggtgccagcctgggggtgggcccccttccccacctcctggcatacctggccagcctctgccttctccaactcggctccacctaggaggtggtcggaactcaaatgccaatggttatgtgcgtttacagttgggcggagaggaccgaggaggatctgggcacccactgcctgagctcgcggatgaattacgacggaaactacaacagcgccagccgctgcctgactccaacccagaggagtcttcagtatgaggggacccccccacctcattggcggggggggtctcatgggaggtgcactcttaacttttgcacaggcaccagctacctcagggacatggcaggggcacttgctctgcctgggacagacactgcccagcatttgcccggccgtgaggacctgctcagcatgggcactgccacttggtgtggctcaccaggacttcagcctcacaggagacacaccctcctctgtgaatttgagacatgtgggaccccagcagccaaaactttgcaaggaagaggtttcaagatgtgggcgtgtttgtgcatatatgtgttggtatgcatgtggaagaatgtgtgtgtgtgtgtgtgtgtgttgtaactttcctgtctctatcacgtcttcccttggcctggggtcctcctggttgagtctttggagctatgaaggggaagggggtcatagcactttgcttctcctacccccagctgtcccaagctttggggcagtgatgtacatacggggaagggaaggacagggtgttgtaccccttttgggggagtgcgggactcgggggtgggcctagccctgctcctagggctgtgaatgttttcagggcgggggttgggggtggagatggaacctcctgcttcagggggaggggtgggcagggcctcccacttgccctccgggttcggtggtattttatatttgcgctcttctgacagggctgggaagggttgttgggggagggaagggaggaggtgggcatgctatggatactggcctatcctctccctgctctgggaaaagggctaacagtgtaacttattgtgtccccacatatttatttgttgtaaatatttgagtatttttatattgacaaataaaatggagaaaatgaaattt

SEQ ID NO: 3 - protein, 820 aa, Mus musculus
MAPHWAVWLLAAGLWGLGIGAEMWWNLVPRKTVSSGELVTVVRRFSQTGIQDFLTLTLTEHSGLLYVGAREALFAFSVEALELQGAISWEAPAEKKIECTQKGKSNQTECFNFIRFLQPYNSSHLYVCGTYAFQPKCTYINMLTFTLDRAEFEDGKGKCPYDPAKGHTGLLVDGEKATLNNFLGTEPVILRYMGTHHSIKTEYLAFWLNEPHFVGSAFVPESVGSFTGDDDKIYFFFSAVEYDCEQVVARVARVCKGDMGGARTLQKKWTTFLKARLVCSAPDWKVYFNQLKAVHTLRGASWHNTTFFGVFQARWGDMDLSAVCEYQLEQIQQVFEGPYKEYSEQAQKWARYTDPVPSPRPGSCINNWHRDNGYTSSLELPDNTLNFIKKHPLMEDQVKPRLGRPLLVKKNTNFTHVVADRVPGLDGATYTVLFIGTGDGWLLKAVSLGPWIHMVEELQVFDQEPVESLVLSQSKKVLFAGSRSQLVQLSLADCTKYRFCVDCVLARDPYCAWNVNTSRCVATTSGRSGSFLVQHVANLDTSKMCNQYGIKKVRSIPKNITVVSGTDLVLPCHLSSNLAHAHWTFGSQDLPAEQPGSFLYDTGLQALVVMAAQSRHSGPYRCEEQGTRLAAESYLVAVVAGSSVTLEARAPLENLGLVWLAVVGAVCLVLLLLVLSLRRRLREELEKGAKASTLVYPLELPKEPDPFRPGPETDEKLWDPVGYYYSDGSLKIVPGHARCQPGGGPPSPPPGIPGQPLPSPTRLHLGGGRNSNANGYVRLQLGGEDRGGSGHPLPELADELRRKLQQRQPLPDSNPEESSV

SEQ ID NO: 4 - DNA, 10385 bp, Homo sapiens
  misc_feature (1)...(10385): n = A,T,C or G
gctggagaaagagccggcgcccgccgtggtggcgcggggagcccgagcctaggggcgcggagccgggcggggacggaggggcggtggcagagaggccgcggagggctggcgggcgagcgcgggcaggcggcgacgcgggggcaggggtggacggcggtcagagccgaacgcgagggcggcgcccggggactggagctgcgcgcaataggtgagcgaggccgggnnnnnnnnnnnnnnnnnnnnnnnnnnnnnnnnnnnnnnnnnnnnnnnnnnnnnnnnnnnnnnnnnnnnnnnnnccgctttgtccctttgcttgggcaggggctgccggacgcgggagggacaggggctggggcgcggggagccgcggcggcggagacggctgtacgcggggatccttcctgcgacccccgcggctgcttcgcagggtctcgggagtggggcgcacagcacctgcagccccgcagccccggggccggaggggcgcgccagcgagggttcctcgcgcggtccggtccgcggccgggatcctcgccaggctcctggactgccctcggcgctcccacccccgatggaaagtttggggcgggcttggagggaggccgatgttgtgggatcggatttccctgccgcggccccccgcccgcccgcccattccgctggggaggcgggttgtcccggaaagccaggcccccgggccgagccgggccgcgccgtccccggctggagcgctcgccctgcagggagggccgcggtccacggctggccgctcggggtgggcgagggtgtggggtgccccgcctggatcccgcacccctccccccaacccctcctcccggctgcccgtttcctcgccctggggggagctgcgggtgggagcaccgctgccgggcggatcctcggagcacgccacggggtgcggcccgatcctcgggtaaggagccgagatgaggccgcgggcgttttggggggctggtctggggcgcagcccccgctctcccgcgccggggctctgggccgacagggggcgtccgcaggccgggctcgccacgctccccgcgccgccgctttgtttgcgttcaaatccctggagctgggggaggggagaacccggggggacccgggacggggtcttggcggggaccctttgtttgggggtgagcaggtccccagcttctgcgtctccgcccctggcacgggaaggctggagcaggggaagccaatcccgctggcccgcccaggccagggtccctggggcgcagtccccgagttgggaaggttcgtcagagtcgcgggagcgcagcgggtgccggccgtgcgcggcgcgttgccagcggcccgggaggaaccccctcgcgtccccgcccctacctccccccgtcgcctgcgcgcgccgccggagtccccgactcgacccgagctcggtccccccaccgcccctccgccagagggctggtgtttcggaggaggcagtgcgaggaacaggatgaggccctggtcatttccacgcccatcccacccacttcctgcctccctcttgggcaacaaaggggcctcgggaagctgggccccttcgctcccggcccttctcacactcctgccctgctgatgtggaacggggtttggggttctgcagggctattgtctgcgctggggaaggggacaggccgggaccgggacctccgctcgcagccggccgcaccaggtttcccctttggggctttcccgaccgcctaccccaccgcatgccctcgtcgccctaaggagtcttcctcccagaattaggtgttggcagggtccggagccccagtggctgcaaggcctgctgcctgaggttctttcaagaaactcaaacctcttaggcctgagtgtgtatgttgggcgggggtcccctttttatttctcaaatgatttcctgttgcgcagaggtagtggtgggtctggaggccagggagggcttcccggagcctgtttagccttcagccaactcaactcctccccgcttcccagggagacctgtggtcttttaggcagaggccaagtgtggggacttaggtccacctccaaagagaaggggaaggagggcaccggggctcctggaaggcctgatgaggagtcctgtggcctctcctgctgcgggcccctctggtttgctttctctggctgtgatttctgaccatgtcttttccctcagcaggacagctggcctgaagctcagagccggggcgtgcgccatggccccacactgggctgtctggctgctggcagcaaggctgtggggcctgggcattggggctgaggtgtggtggaaccttgtgccgcgtaagacagtgtcttctgggggtgagtgcctggaggggtgaggaggaagtcagggacaggctgctgaggagttgcccccatagtgtgctggctttattctcacgtgtgtggcacagctttctaagaaactcgagttggaagaacgggcagtgtgggttgggacctgggattagcctcctctgggggagctctgtccaactccccaccccagactgcctgcccaggtgtgggagggggagagccttctgcctcgccctctccacgcctcgcttcttgaattgtcactggcgctgggagcctaaagagaaactggaaccgggataaatataaactggaggctctctcccctggctccccaggcccccctaagacctcctactgccctgtacacatcatacactctggtggccctggaagtgtgtgtgtatgtgcacatgctcgcatggttgccggggcacagcggggacccagcagtgctccctgtgcacacacccgtgtgaaaggtgatgtcaggtgtttgtatcagccgtgcgctctggggacctgggatgagctcacctcccacaggctccactcgggtgccagtgaagccctgccatgccggtctgtgtctggatccattgttgcctgcaaagactaaggctggtttggggggaccctgaggacaggtcggcagccatatttggcagctgatgtaggaatcacgtgactgtataaatgtcgtagtgccctgcatgccgggtggcagcaagacttcccaggccccagccccatctccgctctctgagcctctggtttctccggacctccctggcctggctcacagcccagctcccctcctgccatccccacctgtcctagtggcctgctgtgctcgcatctctggcagcctggattggggtcctgctggagtgaagggtttcctgaggcagggagtactcatagccgtctgtgcctcctgctctgctggactctgatagaggcagtgggcagcagggcaaagaaggaagcagccgccgaggaagcgaaggtggggtgggggtgcccagccctgcggccggaggtgccattgaccctgagagcaagagccatcagtctgatggcttcctctggccggaagctgtggctgagatatccttccttcctcccagcagcctggatttgcctcctcccaggctgggaaaggctagggaggcccaggtggggctgtcagggccaaaggctgtttcaaaagtgtcctttattgccaatcagggggtttggctggcatctgcttgtggcatggggtgctggctctcgtggagcaagactgagggctgtcgagccccaggggtcctgcccatcagcagccatgcttacccctgcagagctggccacggtagtacggcggttctcccagaccggcatccaggacttcctgacactgacgctgacggagcccactgggcttctgtacgtgggcgcccgagaggccctgtttgccttcagcatggaggccctggagctgcaaggagcggtgagaggtggggcagtgggaggcagtcgggcctgccagagggcaaggcccagaggggctgtgcttggctaggtggtccctcagcctggctgcccccacagaagtgctgctgggcatccggggcctgccctctggttggggtcagcatgcggcattcctctcctctctggcacttactgaattctgtgtagtggggtggtttggggcttccattctgtactaaaggaagtccccagagaatagggaccatgcctctgcactgggcgtccctgtgttgctgctgcaggctgtgcttgtgacacgtgctcagtccgtacctgtaacgtggctgacatccccttccctttccccagatctcctgggaggcccccgtggagaagaagactgagtgtatccagaaagggaagaacaaccaggtgggtgcttggacgctgctcctggtgctgccttcaccccaggacgtctcctcccattctggccctcgcgctctcactaaccggacacctttctgcccccagaccgagtgcttcaacttcatccgcttcctgcagccctacaatgcctcccacctgtacgtctgtggcacctacgccttccagcccaagtgcacctacgtcgtgagtgctgccctcctacctcggtgtccccagccccccgccctcctcacccttctctggactcgtggatgtggcccacagagccctgcccttaagcatctcctcatcacctctctctctgtccttagaacatgctcaccttcactttggagcatggagagtttgaagatgggaagggcaagtgtccctatgacccagctaagggccatgctggccttcttgtgggtgagtggctgccccccatgcaggctgggtgagtccttggggcttggttccacttgggtctgtgttggccggatgtgtccatacctcatgtgtggcctagctgacctctgtctcccatagatggtgagctgtactcggccacactcaacaacttcctgggcacggaacccattatcctgcgtaacatggggccccaccactccatgaagacagagtacctggccttttggctcaacggtgagccaccggggggcctgtgggagccatgggtgggaggtcccccggggcccagcccctccctgctgacctcctccccttcccacagaacctcactttgtaggctctgcctatgtacctgagagtgtgggcagcttcacgggggacgacgacaaggtctacttcttcttcagggagcgggcagtggagtccgactgctatgccgagcaggtggtggctcgtgtggcccgtgtctgcaaggtaccgagtctcacagcggtgggccctgggagccctgctggcccagcggggctgaccggcagtgtccccttgccgtctgccagggcgatatggggggcgcacggaccctgcagaggaagtggaccacgttcctgaaggcgcggctggcatgctctgccccgaactggcagctctacttcaaccagctgcaggcgatgcacaccctgcaggacacctcctggcacaacaccaccttctttggggtttttcaagcacagtggtgagttggccagggctcccacagagtggggaggagctggggttcaggtcagggacggtgcatgggtgggagcctggaccaggcctcagaggcagtcccggaagccaggtgtccagaagccaaggagaatgctggcacctgcccctttcagagctgcctgtgaaggggcagggccccatgccaggtggcacttgagctgccagggcattctggtacccatggccagtttgtgccaggccctgccttcctgctgcttgcccttagctggggtgggaagagataaggtgggtacctgaccctgggctccctctcgctgtgacaggggtgacatgtacctgtcggccatctgtgagtaccagttggaagagatccagcgggtgtttgagggcccctataaggagtaccatgaggaagcccagaagtgggaccgctacactgaccctgtacccagccctcggcctggctcggtgagtgctagggcagggatgcatctccccacccagctgcggtgccatcccaccctgctgatggcctgccccccacaccctgcccccagtgcattaacaactggcatcggcgccacggctacaccagctccctggagctacccgacaacatcctcaacttcgtcaagaagcacccgctgatggaggagcaggtggggcctcggtggagccgccccctgctcgtgaagaagggcaccaacttcacccacctggtggccgaccgggttacaggacttgatggagccacctatacagtgctgttcattggcacaggtgggtgcatgggtatgcaggcatggctgctcaaggctgggcagaagcccgtgtgcccagggcagggagatttggagctgccccacggccttgtgccctctcatttacaccttctcctctgcaccccccaggagacggctggctgctcaaggctgtgagcctggggccctgggttcacctgattgaggagctgcagctgtttgaccaggagcccatgagaagcctggtgctatctcagagcaaggtagtaagttgggccctatctgccactgtccccagcactatcccatctcactctctccatctggctgcttctcccagttgggcctatgtgcttggccagtgcagagttaggaacacacacacatgtggatgcacaccttgcctaacttggggtgggttcctggaaacgagaatgaaaacagaatggaatctgcactgcacagggccattatatatagccaggtcacggggctgcgctcccagcatcaagccttggcaactgctcccatgtttctttcagaccctccaagctgtgctgtggttctggctctggcctcttccctgaccatgcccctgtgaccagacctcccaggctgtgagatgtttatgatgccctcaccatggtggttttccttccagcccccatttccgtgactgtttccctgaagtgcttgcattatacccttgtgcaatactctttttggtttttttttgagatggagtctcactctgtcacccaggctagagtgcagtgacgcgatctcagctcactgcaacctccacctcccaggttgaagctattcttatgcctcagcctcctgagtagctgggattacaggtgcctgccactatgcccagctaaaggttttttgtttttgtttttgttttctttgagatggagtctcactctgtcgcccaggctggagtgcggtggcatgatctctgctcactgcaacctccacctcccgggttcaagcaattctgcctcggcctcccaagtaactgggactacaggcacgtgccaccatgcccagctaatttttttttttttttttttttttgagatggagtctcgctctgtcacccaggctggagtgcagtggcgcaatctcggctcactgcaagctctgcctcccaggttcacaccattctcctgcctcagccttccatgtagctgggactacaggctcccatcaccacgcctggctaattttttgtatttttagtagagacggggtttcaccgtgttagccaggatggtctcgatctcctgaccttgcgatccgcccgactcagcctcccaaagtgctgggattacaggcgtgagccactgcgcctggccagccggctaatttttgtatttttagtagagacaaggttttaccatgttggccaggctggtcttgaactcctaacctcaagtgatttgcccacctcagcctcccaaagtgctgggattccaggcatgacctgctgttcctagttgccttgtgcaatactcttgtggcatgtttgctacacctcctgaactttgatttgtttgccttttaccagctattatgactcaaaattgtcccctagaacatggaataatggcagaaagaaagtgtgtggttgaataaacacacagattggcatccaccgttgaaacaggaaaacatcttatgttatgctgctgctgttgtgagggctgatgggccttgaaatgtatttcctgcactatgtgtgtgtgagtgtgtgtgattatactttttggcctcacagccccatcatccctttctaataacgtcacgtcgataaggggcttaggattgcatctggcctgtgtaagccctctgagttctgcggttcttagagttcccttttcagcactatagctctgccttgttcccttgttcctccttctggcgccccgtgctgtgccccctgcaggagtccaagctgtccccatgctgcgttctggtccggccgcccctcccgtggtgtggccctggccgacccccctcctgcgccccgcttttctcgcagaagctgctctttgccggctcccgctctcagctggtgcagctgcccgtggccgactgcatgaagtatcgctcctgtgcagactgtgtcctcgcccgggacccctattgcgcctggagcgtcaacaccagccgctgtgtggccgtgggtggccactctgggtgagttgggctctacataggccaggacctccagggactcagggtggttggagccaggctgctgatgtaccctacatcccctaccagatctctactgatccagcatgtgatgacctcggacacttcaggcatctgcaacctccgtggcagtaagaaaggtgagctttttcattcccgtcgcatcgggctgagccctggaccagagctggagtttctgttctcctcttccccagccctgctttcctgcactaacatgcactctgttttctctgccactacagtcaggcccactcccaaaaacatcacggtggtggcgggcacagacctggtgctgccctgccacctctcctccaacttggcccatgcccgctggacctttgggggccgggacctgcctgcggaacagcccgggtccttcctctacgatgcccggctccaggccctggttgtgatggctgcccagccccgccatgccggggcctaccactgcttttcagaggagcagggggcgcggctggctgctgaaggctaccttgtggctgtcgtggcaggcccgtcggtgaccttggaggcccgggcccccctggaaaacctggggctggtgtggctggcggtggtggccctgggggctgtgtgcctggtgctgctgctgctggtgctgtcattgcgccggcggctgcgggaagagctggagaaaggggccaaggctactgagaggaccttggtgtaccccctggagctgcccaaggagcccaccagtccccccttccggccctgtcctgaaccagatgagaaactttgggatcctgtcggttactactattcagatggctcccttaagatagtacctgggcatgcccggtgccagcccggtggggggcccccttcgccacctccaggcatcccaggccagcctctgccttctccaactcggcttcacctggggggtgggcggaactcaaatgccaatggttacgtgcgcttacaactaggaggggaggaccggggagggctcgggcaccccctgcctgagctcgcggatgaactgagacgcaaactgcagcaacgccagccactgcccgactccaaccccgaggagtcatcagtatgaggggaacccccaccgcgtcggcgggaagcgtgggaggtgtagctcctacttttgcacaggcaccagctacctcagggacatggcacgggcacctgctctgtctgggacagatactgcccagcacccacccggccatgaggacctgctctgctcagcacgggcactgccacttggtgtggctcaccagggcaccagcctcgcagaaggcatcttcctcctctctgtgaatcacagacacgcgggaccccagccgccaaaacttttcaaggcagaagtttcaagatgtgtgtttgtctgtatttgcacatgtgtttgtgtgtgtgtgtatgtgtgtgtgcacgcgcgtgcgcgcttgtggcatagccttcctgtttctgtcaagtcttcccttggcctgggtcctcctggtgagtcattggagctatgaaggggaaggggtcgtatcactttgtctctcctacccccactgccccgagtgtcgggcagcgatgtacatatggaggtggggtggacagggtgctgtgccccttcagagggagtgcagggcttggggtgggcctagtcctgctcctagggctgtgaatgttttcagggtggggggagggagatggagcctcctgtgtgtttggggggaagggtgggtggggcctcccacttggccccggggttcagtggtattttatacttgccttcttcctgtacagggctgggaaaggctgtgtgaggggagagaagggagagggtgggcctgctgtggacaatggcatactctcttccagccctaggaggagggctcctaacagtgtaacttattgtgtccccgcgtatttatttgttgtaaatatttgagtatttttatattgacaaataaaatggagaaaatgaaacga

SEQ ID NO: 5 - DNA, 3782 bp, Homo sapiens
ctgtgctcgcatctctggcagcctggattggggtcctgctggagtgaagggtttcctgaggcagggagtactcatagccgtctgtgcctcctgctctgctggactctgatagaggcagtgggcagcagggcaaagaaggaagcagccgccgaggaagcgaaggtggggtgggggtgcccagccctgcggccggaggtgccattgaccctgagagcaagagccatcagtctgatggcttcctctggccggaagctgtggctgagatatccttccttcctcccagcagcctggatttgcctcctcccaggctgggaaaggctagggaggcccaggtggggctgtcagggccaaaggctgtttcaaaagtgtcctttattgccaatcagggggtttggctggcatctgcttgtggcatggggtgctggctctcgtggagcaagactgagggctgtcgagccccaggggtcctgcccatcagcagccatgcttacccctgcagagctggccacggtagtacggcggttctcccagaccggcatccaggacttcctgacactgacgctgacggagcccactgggcttctgtacgtgggcgcccgagaggccctgtttgccttcagcatggaggccctggagctgcaaggagcgatctcctgggaggcccccgtggagaagaagactgagtgtatccagaaagggaagaacaaccagaccgagtgcttcaacttcatccgcttcctgcagccctacaatgcctcccacctgtacgtctgtggcacctacgccttccagcccaagtgcacctacgtcaacatgctcaccttcactttggagcatggagagtttgaagatgggaagggcaagtgtccctatgacccagctaagggccatgctggccttcttgtggatggtgagctgtactcggccacactcaacaacttcctgggcacggaacccattatcctgcgtaacatggggccccaccactccatgaagacagagtacctggccttttggctcaacgaacctcactttgtaggctctgcctatgtacctgagagtgtgggcagcttcacgggggacgacgacaaggtctacttcttcttcagggagcgggcagtggagtccgactgctatgccgagcaggtggtggctcgtgtggcccgtgtctgcaagggcgatatggggggcgcacggaccctgcagaggaagtggaccacgttcctgaaggcgcggctggcatgctctgccccgaactggcagctctacttcaaccagctgcaggcgatgcacaccctgcaggacacctcctggcacaacaccaccttctttggggtttttcaagcacagtggggtgacatgtacctgtcggccatctgtgagtaccagttggaagagatccagcgggtgtttgagggcccctataaggagtaccatgaggaagcccagaagtgggaccgctacactgaccctgtacccagccctcggcctggctcgtgcattaacaactggcatcggcgccacggctacaccagctccctggagctacccgacaacatcctcaacttcgtcaagaagcacccgctgatggaggagcaggtggggcctcggtggagccgccccctgctcgtgaagaagggcaccaacttcacccacctggtggccgaccgggttacaggacttgatggagccacctatacagtgctgttcattggcacaggagacggctggctgctcaaggctgtgagcctggggccctgggttcacctgattgaggagctgcagctgtttgaccaggagcccatgagaagcctggtgctatctcagagcaagaagctgctctttgccggctcccgctctcagctggtgcagctgcccgtggccgactgcatgaagtatcgctcctgtgcagactgtgtcctcgcccgggacccctattgcgcctggagcgtcaacaccagccgctgtgtggccgtgggtggccactctggatctctactgatccagcatgtgatgacctcggacacttcaggcatctgcaacctccgtggcagtaagaaagtcaggcccactcccaaaaacatcacggtggtggcgggcacagacctggtgctgccctgccacctctcctccaacttggcccatgcccgctggacctttgggggccgggacctgcctgcggaacagcccgggtccttcctctacgatgcccggctccaggccctggttgtgatggctgcccagccccgccatgccggggcctaccactgcttttcagaggagcagggggcgcggctggctgctgaaggctaccttgtggctgtcgtggcaggcccgtcggtgaccttggaggcccgggcccccctggaaaacctggggctggtgtggctggcggtggtggccctgggggctgtgtgcctggtgctgctgctgctggtgctgtcattgcgccggcggctgcgggaagagctggagaaaggggccaaggctactgagaggaccttggtgtaccccctggagctgcccaaggagcccaccagtccccccttccggccctgtcctgaaccagatgagaaactttgggatcctgtcggttactactattcagatggctcccttaagatagtacctgggcatgcccggtgccagcccggtggggggcccccttcgccacctccaggcatcccaggccagcctctgccttctccaactcggcttcacctggggggtgggcggaactcaaatgccaatggttacgtgcgcttacaactaggaggggaggaccggggagggctcgggcaccccctgcctgagctcgcggatgaactgagacgcaaactgcagcaacgccagccactgcccgactccaaccccgaggagtcatcagtatgaggggaacccccaccgcgtcggcgggaagcgtgggaggtgtagctcctacttttgcacaggcaccagctacctcagggacatggcacgggcacctgctctgtctgggacagatactgcccagcacccacccggccatgaggacctgctctgctcagcacgggcactgccacttggtgtggctcaccagggcaccagcctcgcagaaggcatcttcctcctctctgtgaatcacagacacgcgggaccccagccgccaaaacttttcaaggcagaagtttcaagatgtgtgtttgtctgtatttgcacatgtgtttgtgtgtgtgtgtatgtgtgtgtgcacgcgcgtgcgcgcttgtggcatagccttcctgtttctgtcaagtcttcccttggcctgggtcctcctggtgagtcattggagctatgaaggggaaggggtcgtatcactttgtctctcctacccccactgccccgagtgtcgggcagcgatgtacatatggaggtggggtggacagggtgctgtgccccttcagagggagtgcagggcttggggtgggcctagtcctgctcctagggctgtgaatgttttcagggtggggggagggagatggagcctcctgtgtgtttggggggaagggtgggtggggcctcccacttggccccggggttcagtggtattttatacttgccttcttcctgtacagggctgggaaaggctgtgtgaggggagagaagggagagggtgggcctgctgtggacaatggcatactctcttccagccctaggaggagggctcctaacagtgtaacttattgtgtccccgcgtatttatttgttgtaaatatttgagtatttttatattgacaaataaaatggagaaaatgaaacga

SEQ ID NO: 6 - protein, 882 aa, Homo sapiens
MASSGRKLWLRYPSFLPAAWICLLPGWERLGRPRWGCQGQRLFQKCPLLPIRGFGWHLLVAWGAGSRGARLRAVEPQGSCPSAAMLTPAELATVVRRFSQTGIQDFLTLTLTEPTGLLYVGAREALFAFSMEALELQGAISWEAPVEKKTECIQKGKNNQTECFNFIRFLQPYNASHLYVCGTYAFQPKCTYVNMLTFTLEHGEFEDGKGKCPYDPAKGHAGLLVDGEKATLNNFLGTEPIILRNMGPHHSMKTEYLAFWLNEPHFVGSAYVPESVGSFTGDDDKVYFFFRERAVESDCYAEQVVARVARVCKGDMGGARTLQRKWTTFLKARLACSAPNWQLYFNQLQAMHTLQDTSWHNTTFFGVFQAQWGDMYLSAICEYQLEEIQRVFEGPYKEYHEEAQKWDRYTDPVPSPRPGSCINNWHRRHGYTSSLELPDNILNFVKKHPLMEEQVGPRWSRPLLVKKGTNFTHLVADRVTGLDGATYTVLFIGTGDGWLLKAVSLGPWVHLIEELQLFDQEPMRSLVLSQSKKLLFAGSRSQLVQLPVADCMKYRSCADCVLARDPYCAWSVNTSRCVAVGGHSGSLLIQHVMTSDTSGICNLRGSKKVRPTPKNITVVAGTDLVLPCHLSSNLAHARWTFGGRDLPAEQPGSFLYDARLQALVVMAAQPRHAGAYHCFSEEQGARLAAEGYLVAVVAGPSVTLEARAPLENLGLVWLAVVGAVCLVLLLLVLSLRRRLREELEKGAKATERTLVYPLELPKEPTSPPFRPCPEPDEKLWDPVGYYYSDGSLKIVPGHARCQPGGGPPSPPPGIPGQPLPSPTRLHLGGGRNSNANGYVRLQLGGEDRGGLGHPLPELADELRRKLQQRQPLPDSNPEESSV

SEQ ID NO: 7 - DNA, 2606 bp, Homo sapiens
ggcgatatggggggcgcacggaccctgcagaggaagtggaccacgttcctgaaggcgcggctggcatgctctgccccgaactggcagctctacttcaaccagctgcaggcgatgcacaccctgcaggacacctcctggcacaacaccaccttctttggggtttttcaagcacagtggggtgacatgtacctgtcggccatctgtgagtaccagttggaagagatccagcgggtgtttgagggcccctataaggagtaccatgaggaagcccagaagtgggaccgctacactgaccctgtacccagccctcggcctggctcgtgcattaacaactggcatcggcgccacggctacaccagctccctggagctacccgacaacatcctcaacttcgtcaagaagcacccgctgatggaggagcaggtggggcctcggtggagccgccccctgctcgtgaagaagggcaccaacttcacccacctggtggccgaccgggttacaggacttgatggagccacctatacagtgctgttcattggcacaggagacggctggctgctcaaggctgtgagcctggggccctgggttcacctgattgaggagctgcagctgtttgaccaggagcccatgagaagcctggtgctatctcagagcaagaagctgctctttgccggctcccgctctcagctggtgcagctgcccgtggccgactgcatgaagtatcgctcctgtgcagactgtgtcctcgcccgggacccctattgcgcctggagcgtcaacaccagccgctgtgtggccgtgggtggccactctggatctctactgatccagcatgtgatgacctcggacacttcaggcatctgcaacctccgtggcagtaagaaagtcaggcccactcccaaaaacatcacggtggtggcgggcacagacctggtgctgccctgccacctctcctccaacttggcccatgcccgctggacctttgggggccgggacctgcctgcggaacagcccgggtccttcctctacgatgcccggctccaggccctggttgtgatggctgcccagccccgccatgccggggcctaccactgcttttcagaggagcagggggcgcggctggctgctgaaggctaccttgtggctgtcgtggcaggcccgtcggtgaccttggaggcccgggcccccctggaaaacctggggctggtgtggctggcggtggtggccctgggggctgtgtgcctggtgctgctgctgctggtgctgtcattgcgccggcggctgcgggaagagctggagaaaggggccaaggctactgagaggaccttggtgtaccccctggagctgcccaaggagcccaccagtccccccttccggccctgtcctgaaccagatgagaaactttgggatcctgtcggttactactattcagatggctcccttaagatagtacctgggcatgcccggtgccagcccggtggggggcccccttcgccacctccaggcatcccaggccagcctctgccttctccaactcggcttcacctggggggtgggcggaactcaaatgccaatggttacgtgcgcttacaactaggaggggaggaccggggagggctcgggcaccccctgcctgagctcgcggatgaactgagacgcaaactgcagcaacgccagccactgcccgactccaaccccgaggagtcatcagtatgaggggaacccccaccgcgtcggcgggaagcgtgggaggtgtagctcctacttttgcacaggcaccagctacctcagggacatggcacgggcacctgctctgtctgggacagatactgcccagcacccacccggccatgaggacctgctctgctcagcacgggcactgccacttggtgtggctcaccagggcaccagcctcgcagaaggcatcttcctcctctctgtgaatcacagacacgcgggaccccagccgccaaaacttttcaaggcagaagtttcaagatgtgtgtttgtctgtatttgcacatgtgtttgtgtgtgtgtgtatgtgtgtgtgcacgcgcgtgcgcgcttgtggcatagccttcctgtttctgtcaagtcttcccttggcctgggtcctcctggtgagtcattggagctatgaaggggaaggggtcgtatcactttgtctctcctacccccactgccccgagtgtcgggcagcgatgtacatatggaggtggggtggacagggtgctgtgccccttcagagggagtgcagggcttggggtgggcctagtcctgctcctagggctgtgaatgttttcagggtggggggagggagatggagcctcctgtgtgtttggggggaagggtgggtggggcctcccacttggccccggggttcagtggtattttatacttgccttcttcctgtacagggctgggaaaggctgtgtgaggggagagaagggagagggtgggcctgctgtggacaatggcatactctcttccagccctaggaggagggctcctaacagtgtaacttattgtgtccccgcgtatttatttgttgtaaatatttgagtatttttatattgacaaataaaatggagaaaatgaaacga

SEQ ID NO: 8 - protein, 567 aa, Homo sapiens
MGGARTLQRKWTTFLKARLACSAPNWQLYFNQLQAMHTLQDTSWHNTTFFGVFQAQWGDMYLSAICEYQLEEIQRVFEGPYKEYHEEAQKWDRYTDPVPSPRPGSCINNWHRRHGYTSSLELPDNILNFVKKHPLMEEQVGPRWSRPLLVKKGTNFTHLVADRVTGLDGATYTVLFIGTGDGWLLKAVSLGPWVHLIEELQLFDQEPMRSLVLSQSKKLLFAGSRSQLVQLPVADCMKYRSCADCVLARDPYCAWSVNTSRCVAVGGHSGSLLIQHVMTSDTSGICNLRGSKKVRPTPKNITVVAGTDLVLPCHLSSNLAHARWTFGGRDLPAEQPGSFLYDARLQALVVMAAQPRHAGAYHCFSEEQGARLAAEGYLVAVVAGPSVTLEARAPLENLGLVWLAVVGAVCLVLLLLVLSLRRRLREELEKGAKATERTLVYPLELPKEPTSPPFRPCPEPDEKLWDPVGYYYSDGSLKIVPGHARCQPGGGPPSPPPGIPGQPLPSPTRLHLGGGRNSNANGYVRLQLGGEDRGGLGHPLPELADELRRKLQQRQPLPDSNPEESSV

SEQ ID NO: 9 - DNA, 3523 bp, Homo sapiens
gctggagaaagagccggcgcccgccgtggtggcgcggggagcccgagcctaggggcgcggagccgggcggggacggaggggcggtggcagagaggccgcggagggctggcgggcgagcgcgggcaggcggcgacgcgggggcaggggtggacggcggtcagagccgaacgcgagggcggcgcccggggactggagctgcgcgcaatagcaggacagctggcctgaagctcagagccggggcgtgcgccatggccccacactgggctgtctggctgctggcagcaaggctgtggggcctgggcattggggctgaggtgtggtggaaccttgtgccgcgtaagacagtgtcttctggggagctggccacggtagtacggcggttctcccagaccggcatccaggacttcctgacactgacgctgacggagcccactgggcttctgtacgtgggcgcccgagaggccctgtttgccttcagcatggaggccctggagctgcaaggagcgatctcctgggaggcccccgtggagaagaagactgagtgtatccagaaagggaagaacaaccagaccgagtgcttcaacttcatccgcttcctgcagccctacaatgcctcccacctgtacgtctgtggcacctacgccttccagcccaagtgcacctacgtcaacatgctcaccttcactttggagcatggagagtttgaagatgggaagggcaagtgtccctatgacccagctaagggccatgctggccttcttgtggaacctcactttgtaggctctgcctatgtacctgagagtgtgggcagcttcacgggggacgacgacaaggtctacttcttcttcagggagcgggcagtggagtccgactgctatgccgagcaggtggtggctcgtgtggcccgtgtctgcaagggcgatatggggggcgcacggaccctgcagaggaagtggaccacgttcctgaaggcgcggctggcatgctctgccccgaactggcagctctacttcaaccagctgcaggcgatgcacaccctgcaggacacctcctggcacaacaccaccttctttggggtttttcaagcacagtggggtgacatgtacctgtcggccatctgtgagtaccagttggaagagatccagcgggtgtttgagggcccctataaggagtaccatgaggaagcccagaagtgggaccgctacactgaccctgtacccagccctcggcctggctcgtgcattaacaactggcatcggcgccacggctacaccagctccctggagctacccgacaacatcctcaacttcgtcaagaagcacccgctgatggaggagcaggtggggcctcggtggagccgccccctgctcgtgaagaagggcaccaacttcacccacctggtggccgaccgggttacaggacttgatggagccacctatacagtgctgttcattggcacaggagacggctggctgctcaaggctgtgagcctggggccctgggttcacctgattgaggagctgcagctgtttgaccaggagcccatgagaagcctggtgctatctcagagcaagaagctgctctttgccggctcccgctctcagctggtgcagctgcccgtggccgactgcatgaagtatcgctcctgtgcagactgtgtcctcgcccgggacccctattgcgcctggagcgtcaacaccagccgctgtgtggccgtgggtggccactctggatctctactgatccagcatgtgatgacctcggacacttcaggcatctgcaacctccgtggcagtaagaaagtcaggcccactcccaaaaacatcacggtggtggcgggcacagacctggtgctgccctgccacctctcctccaacttggcccatgcccgctggacctttgggggccgggacctgcctgcggaacagcccgggtccttcctctacgatgcccggctccaggccctggttgtgatggctgcccagccccgccatgccggggcctaccactgcttttcagaggagcagggggcgcggctggctgctgaaggctaccttgtggctgtcgtggcaggcccgtcggtgaccttggaggcccgggcccccctggaaaacctggggctggtgtggctggcggtggtggccctgggggctgtgtgcctggtgctgctgctgctggtgctgtcattgcgccggcggctgcgggaagagctggagaaaggggccaaggctactgagaggaccttggtgtaccccctggagctgcccaaggagcccaccagtccccccttccggccctgtcctgaaccagatgagaaactttgggatcctgtcggttactactattcagatggctcccttaagatagtacctgggcatgcccggtgccagcccggtggggggcccccttcgccacctccaggcatcccaggccagcctctgccttctccaactcggcttcacctggggggtgggcggaactcaaatgccaatggttacgtgcgcttacaactaggaggggaggaccggggagggctcgggcaccccctgcctgagctcgcggatgaactgagacgcaaactgcagcaacgccagccactgcccgactccaaccccgaggagtcatcagtatgaggggaacccccaccgcgtcggcgggaagcgtgggaggtgtagctcctacttttgcacaggcaccagctacctcagggacatggcacgggcacctgctctgtctgggacagatactgcccagcacccacccggccatgaggacctgctctgctcagcacgggcactgccacttggtgtggctcaccagggcaccagcctcgcagaaggcatcttcctcctctctgtgaatcacagacacgcgggaccccagccgccaaaacttttcaaggcagaagtttcaagatgtgtgtttgtctgtatttgcacatgtgtttgtgtgtgtgtgtatgtgtgtgtgcacgcgcgtgcgcgcttgtggcatagccttcctgtttctgtcaagtcttcccttggcctgggtcctcctggtgagtcattggagctatgaaggggaaggggtcgtatcactttgtctctcctacccccactgccccgagtgtcgggcagcgatgtacatatggaggtggggtggacagggtgctgtgccccttcagagggagtgcagggcttggggtgggcctagtcctgctcctagggctgtgaatgttttcagggtggggggagggagatggagcctcctgtgtgtttggggggaagggtgggtggggcctcccacttggccccggggttcagtggtattttatacttgccttcttcctgtacagggctgggaaaggctgtgtgaggggagagaagggagagggtgggcctgctgtggacaatggcatactctcttccagccctaggaggagggctcctaacagtgtaacttattgtgtccccgcgtatttatttgttgtaaatatttgagtatttttatattgacaaataaaatggagaaaatgaaacga

SEQ ID NO: 10 - protein, 792 aa, Homo sapiens
MAPHWAVWLLAARLWGLGIGAEVWWNLVPRKTVSSGELATVVRRFSQTGIQDFLTLTLTEPTGLLYVGAREALFAFSMEALELQGAISWEAPVEKKTECIQKGKNNQTECFNFIRFLQPYNASHLYVCGTYAFQPKCTYVNMLTFTLEHGEFEDGKGKCPYDPAKGHAGLLVEPHFVGSAYVPESVGSFTGDDDKVYFFFRERAVESDCYAEQVVARVARVCKGDMGGARTLQRKWTTFLKARLACSAPNWQLYFNQLQAMHTLQDTSWHNTTFFGVFQAQWGDMYLSAICEYQLEEIQRVFEGPYKEYHEEAQKWDRYTDPVPSPRPGSCINNWHRRHGYTSSLELPDNILNFVKKHPLMEEQVGPRWSRPLLVKKGTNFTHLVADRVTGLDGATYTVLFIGTGDGWLLKAVSLGPWVHLIEELQLFDQEPMRSLVLSQSKKLLFAGSRSQLVQLPVADCMKYRSCADCVLARDPYCAWSVNTSRCVAVGGHSGSLLIQHVMTSDTSGICNLRGSKKVRPTPKNITVVAGTDLVLPCHLSSNLAHARWTFGGRDLPAEQPGSFLYDARLQALVVMAAQPRHAGAYHCFSEEQGARLAAEGYLVAVVAGPSVTLEARAPLENLGLVWLAVVGAVCLVLLLLVLSLRRRLREELEKGAKATERTLVYPLELPKEPTSPPFRPCPEPDEKLWDPVGYYYSDGSLKIVPGHARCQPGGGPPSPPPGIPGQPLPSPTRLHLGGGRNSNANGYVRLQLGGEDRGGLGHPLPELADELRRKLQQRQPLPDSNPEESSV

SEQ ID NO: 11 - DNA, 3579 bp, Homo sapiens
tcgggaagctgggccccttcgctcccggcccttctcacactcctgccctgctgatgtggaacggggtttggggttctgcagggctattgtctgcgctggggaaggggacaggccgggaccgggacctccgctcgcagccggccgcaccaggacagctggcctgaagctcagagccggggcgtgcgccatggccccacactgggctgtctggctgctggcagcaaggctgtggggcctgggcattggggctgaggtgtggtggaaccttgtgccgcgtaagacagtgtcttctggggagctggccacggtagtacggcggttctcccagaccggcatccaggacttcctgacactgacgctgacggagcccactgggcttctgtacgtgggcgcccgagaggccctgtttgccttcagcatggaggccctggagctgcaaggagcgatctcctgggaggcccccgtggagaagaagactgagtgtatccagaaagggaagaacaaccagaccgagtgcttcaacttcatccgcttcctgcagccctacaatgcctcccacctgtacgtctgtggcacctacgccttccagcccaagtgcacctacgtcaacatgctcaccttcactttggagcatggagagtttgaagatgggaagggcaagtgtccctatgacccagctaagggccatgctggccttcttgtggatggtgagctgtactcggccacactcaacaacttcctgggcacggaacccattatcctgcgtaacatggggccccaccactccatgaagacagagtacctggccttttggctcaacgaacctcactttgtaggctctgcctatgtacctgagagtgtgggcagcttcacgggggacgacgacaaggtctacttcttcttcagggagcgggcagtggagtccgactgctatgccgagcaggtggtggctcgtgtggcccgtgtctgcaagggcgatatggggggcgcacggaccctgcagaggaagtggaccacgttcctgaaggcgcggctggcatgctctgccccgaactggcagctctacttcaaccagctgcaggcgatgcacaccctgcaggacacctcctggcacaacaccaccttctttggggtttttcaagcacagtggggtgacatgtacctgtcggccatctgtgagtaccagttggaagagatccagcgggtgtttgagggcccctataaggagtaccatgaggaagcccagaagtgggaccgctacactgaccctgtacccagccctcggcctggctcgtgcattaacaactggcatcggcgccacggctacaccagctccctggagctacccgacaacatcctcaacttcgtcaagaagcacccgctgatggaggagcaggtggggcctcggtggagccgccccctgctcgtgaagaagggcaccaacttcacccacctggtggccgaccgggttacaggacttgatggagccacctatacagtgctgttcattggcacaggagacggctggctgctcaaggctgtgagcctggggccctgggttcacctgattgaggagctgcagctgtttgaccaggagcccatgagaagcctggtgctatctcagagcaagaagctgctctttgccggctcccgctctcagctggtgcagctgcccgtggccgactgcatgaagtatcgctcctgtgcagactgtgtcctcgcccgggacccctattgcgcctggagcgtcaacaccagccgctgtgtggccgtgggtggccactctggatctctactgatccagcatgtgatgacctcggacacttcaggcatctgcaacctccgtggcagtaagaaagtcaggcccactcccaaaaacatcacggtggtggcgggcacagacctggtgctgccctgccacctctcctccaacttggcccatgcccgctggacctttgggggccgggacctgcctgcggaacagcccgggtccttcctctacgatgcccggctccaggccctggttgtgatggctgcccagccccgccatgccggggcctaccactgcttttcagaggagcagggggcgcggctggctgctgaaggctaccttgtggctgtcgtggcaggcccgtcggtgaccttggaggcccgggcccccctggaaaacctggggctggtgtggctggcggtggtggccctgggggctgtgtgcctggtgctgctgctgctggtgctgtcattgcgccggcggctgcgggaagagctggagaaaggggccaaggctactgagaggaccttggtgtaccccctggagctgcccaaggagcccaccagtccccccttccggccctgtcctgaaccagatgagaaactttgggatcctgtcggttactactattcagatggctcccttaagatagtacctgggcatgcccggtgccagcccggtggggggcccccttcgccacctccaggcatcccaggccagcctctgccttctccaactcggcttcacctggggggtgggcggaactcaaatgccaatggttacgtgcgcttacaactaggaggggaggaccggggagggctcgggcaccccctgcctgagctcgcggatgaactgagacgcaaactgcagcaacgccagccactgcccgactccaaccccgaggagtcatcagtatgaggggaacccccaccgcgtcggcgggaagcgtgggaggtgtagctcctacttttgcacaggcaccagctacctcagggacatggcacgggcacctgctctgtctgggacagatactgcccagcacccacccggccatgaggacctgctctgctcagcacgggcactgccacttggtgtggctcaccagggcaccagcctcgcagaaggcatcttcctcctctctgtgaatcacagacacgcgggaccccagccgccaaaacttttcaaggcagaagtttcaagatgtgtgtttgtctgtatttgcacatgtgtttgtgtgtgtgtgtatgtgtgtgtgcacgcgcgtgcgcgcttgtggcatagccttcctgtttctgtcaagtcttcccttggcctgggtcctcctggtgagtcattggagctatgaaggggaaggggtcgtatcactttgtctctcctacccccactgccccgagtgtcgggcagcgatgtacatatggaggtggggtggacagggtgctgtgccccttcagagggagtgcagggcttggggtgggcctagtcctgctcctagggctgtgaatgttttcagggtggggggagggagatggagcctcctgtgtgtttggggggaagggtgggtggggcctcccacttggccccggggttcagtggtattttatacttgccttcttcctgtacagggctgggaaaggctgtgtgaggggagagaagggagagggtgggcctgctgtggacaatggcatactctcttccagccctaggaggagggctcctaacagtgtaacttattgtgtccccgcgtatttatttgttgtaaatatttgagtatttttatattgacaaataaaatggagaaaatgaaacga

SEQ ID NO: 12 - protein, 829 aa, Homo sapiens
MAPHWAVWLLAARLWGLGIGAEVWWNLVPRKTVSSGELATVVRRFSQTGIQDFLTLTLTEPTGLLYVGAREALFAFSMEALELQGAISWEAPVEKKTECIQKGKNNQTECFNFIRFLQPYNASHLYVCGTYAFQPKCTYVNMLTFTLEHGEFEDGKGKCPYDPAKGHAGLLVDGEKATLNNFLGTEPIILRNMGPHHSMKTEYLAFWLNEPHFVGSAYVPESVGSFTGDDDKVYFFFRERAVESDCYAEQVVARVARVCKGDMGGARTLQRKWTTFLKARLACSAPNWQLYFNQLQAMHTLQDTSWHNTTFFGVFQAQWGDMYLSAICEYQLEEIQRVFEGPYKEYHEEAQKWDRYTDPVPSPRPGSCINNWHRRHGYTSSLELPDNILNFVKKHPLMEEQVGPRWSRPLLVKKGTNFTHLVADRVTGLDGATYTVLFIGTGDGWLLKAVSLGPWVHLIEELQLFDQEPMRSLVLSQSKKLLFAGSRSQLVQLPVADCMKYRSCADCVLARDPYCAWSVNTSRCVAVGGHSGSLLIQHVMTSDTSGICNLRGSKKVRPTPKNITVVAGTDLVLPCHLSSNLAHARWTFGGRDLPAEQPGSFLYDARLQALVVMAAQPRHAGAYHCFSEEQGARLAAEGYLVAVVAGPSVTLEARAPLENLGLVWLAVVGAVCLVLLLLVLSLRRRLREELEKGAKATERTLVYPLELPKEPTSPPFRPCPEPDEKLWDPVGYYYSDGSLKIVPGHARCQPGGGPPSPPPGIPGQPLPSPTRLHLGGGRNSNANGYVRLQLGGEDRGGLGHPLPELADELRRKLQQRQPLPDSNPEESSV

SEQ ID NO: 13 - DNA, 256294 bp, Mus musculus
  misc_feature (1)...(256294): n = A,T,C or G
ccagagggatgcgggcggcagagcgcgagaggcggcggctgggctgcggggcgctgtgactgtccctccacccagtctggtcgcgctcttctcttcggccgattggccgcctcctctccgcaccctggtttctgtctcctgctcctcctttgccccgaccctgttccttatggcagcagctccttgcatcgggggcgcagcttctcagcggactatcctctcactccgcaggctgagcccggtcactggatgttgctgaaactccggagatcatgctctcctttggtcgcagtatcaccgccggctgtccctgccgccgccccctcctctgctgccgcggtccgcgggatgctcagtagcccgctgcgtggcccctgcgatcccgtgttcttcagaagcctttggttgctgcagagttgcgcgaagtagtcatggtgctgtgggagtccccgcggcagtgcagcagctggacactttgcgagggcttctgctggctgctgctgctgcccgtgacgctgcttatcatagcccgcccggtaaaactcgctgctttccctacctccttaagtgactgccaaacgcccaccggctggaactgctccggtaagtccagaccctcagccctctacttcacttctccaagcgcggaacccgcacagacctgtctactctcatatgtctgcccagccactgcctgaaacccagaacttcccacctcaatcctgagaaacattgagaactgcttcagctaaggctgggcgtgctgggataggaacaaagtacaggtgtggggaaccatagatgtttgcccctttcaaatcggaggatttagagaaatactacagaggtagttctccatcctgggggaaaacactaacgcagaacatttcccatcattaaaaaaaataaaaataaaaataaaagagtctagcctggatgtgcgaaaaataactttatgagaaagaacaatcaagaaagcaataaatcaaatgatgactgcagggaaactgttaaggctgccgaaaatgcttctgaatgcaggggttttctagtcagcactgggccacagataattctaaggaggcaagtttccaggaacggagtctctctctctctctctctctctctctctctctctctctctctctctctctctcttcctcctctcctctnnnnnnnnnnnnnnnnnnnnnnnnnnnnnnnnnnnnnnnnnnnnnnnnnnnnnnnnnnnnnnnnnnnnnnnnnnnnnnnnnnnntggctgcaaatgccattgactttgaaagacattgattttgtagccaaagtatgcccatccaagttcttatgtggaggacagaagttgagaaagaagcaaacatagatccccgccccctcccccacgccagaatgggcatgccccaaggctgatagactctcttctgagagcacagtgaccctaccatggcaggtcccaaccccttcacttctgcactgggtttcattgtcaggcagtcctcttgctcattcagtctctgtcagaatactgaagcttgacacctgcatgctattgaagcctctaattgaaaggggcccaaagatcgaagttactgcactcttactggctggttttacatttcagtatcagagtgtctagtttacctgaagaatcatagtgtaatttctttggcattttaaactctataagcacacatggtcattgtctccatggtctaatctggtcttgttttagcaagtgtgtttataacatttcattttagttaagtaaaatcttctcacaattaaatccgactttgaataagatagcctttggagatgtgtaagtgaaaggaagtgtgtgtaacttttgagaggatgtgattattaaatataacttataggtagaggcatgtacagttctaagagatgactaatacaactcttgaggtcaattaattaatgtgcaccactccagtttaaccttggctaagacaagttgaaatgtacagtcatattagatttgggtcagtagactgacttggttcttcttttggtaatttctaaatttggcattttatgaaacacaacatgtctctaacttattcttagttccttcattcatgtatgctattttaaaaagaataaattccacttgggaacagaacatccttaaaatttgatcataactaatgttcaacatgactagcttgtttcctaactaatattggtattaggaatacctagcttgaatataacattgacaatgaggaaatgtgttataaaccagatctctcaaagctgtgttcactaactaaaaatgaagaactgtatttctggaaggttgtgaagagcttggcagcccccacccatccctgttaacttgaaggtgatcaatcttcctttgagtcagaaagaccttcacagaaaacaccaagtctgtttatctttattattgaggttttgcttcctctttgtctggaaaaaaaactgtaagtaagggtcatttcatatcttaaagcgaagaacaattaaaggcagaaatattaaaatggcaactacaaaccatcaccaaatcttttcctaaatattgagtttgggtcactgatataccctacttagtgaggaaaaaaattaaaaagaaagcagagaagcaaatgtcaaactttcactcacacagtcactattagtctaagctaaatttaagaaagcatgctcaaaaggtgatactgagggagactttattaggaaacagttgtaaatgtatggactattattgatcacttttgaggttattagtagaaggcacacttgtggctgttggaattaaattttaagaaaattctgtttgtgctacaaactagaattctctttatacattataacattttaaagtgactggagcattctttttcaacttgaggttacgatgacagagaaaatgatctcttcctgtgtgacaccaacacctgtaaatttgacggggaatgtttaaggattggagacactgtgacttgcgtctgtcagttcaaggtaagatatctgatatttgcatcttcaattcattaaagaggctgcaaggcagtgagcttcttgtacaactcatcatttggcaagttataactgtacagactcaaaaggaggctagcatcaaacaaaagtactggcaagagagcaagctgatgtcaaggtgacatataacttttcgggacctgtgactgacctagtcaaaaatgccactgatgttggataagcttcagtttctactttctagatatggacggaaagtgtgccttcctgaagcactggtgtgtacattttataggtcaactgactgaggataattgtcaaaatagtcagtggatagcagatatggatttgtacttttgttcttcacaagttgtcattattattatttattatattgtcgtttgttttaatgggctttggttttcttatcctgtcaagaggatgcaattttatgttaacttctataaggtcactcctaaactactgtgccagtttggaaatcatgaaccttgttgtatacattaaagattttgagactagcacattaaacaactacagagtctcctaggaattcatatgagcacatagagcctcatgttgaatcgtaagcagaacggtggacattgtcatctgtcagagaggttttcaacagttagaaagaaaagtatatttttacaaagaagttatcatcaaagttgttaaaatgaatttaaaataatgcttccattgttgttattacaatcattatttatcccatttgccactatgaaaattactggagtctgcttcttttcaaaatattcatataataatatatagcctcaaataacttggatgttgaactagtaccgtggactcacacttgattattattgaattacatttaacaccaaacatttacatctaatttaagctgatgcaagaaatatgcatataaataaaactatgaacaagatcaaaggcacttccaaaattataaaagcatgagttgttgaaaactagaaacacaaagtcatattttgacttactgtaccatattgaatattgacttaatggtgaatacataggacttaaccctacatcttggtgaggcagataagaaaactcacctttaaatatgggttgagatacttttagagaagataaaagctccttgtgcattttttcctcctttttgagaaacagagcaagattattggtagcttaaagtggccaaagacattgccatggctttagcgatccatcagtgcagatcacatacatgtggcatctactttcagggtctcccccacagtgagggaagagctacgtgaaggagatggaacatgagaattttcaatttataatttttataattgataactaaagaggatggaaaaccaactggagaaatcacgcccatggaatttcataccttttctttttctttttaagtttgtgattcctgagaatttctcttatttttgtagccagggataggtacagcaagtaaacttgtaattagcagaagatggttcacaaagcacattcttcaaatgagatgtttgtgtttcactggaaaaaaaaaaaactggtgtaattctgggtaaatgcgcaaaatggaagcatatcatttttcctattaaagaactgtctgtgtttgatttttagctgccaaatgaaaatttaaataggaaatataaatatatttccttatttgtactggattatactgttattagtgtgttttacaataataagtaatttaagaggaaaaaatctttctagtagtaaatttaaactttgtatatttatcataattattgaatgtctacaccaagttgatggttaaataaaattgtacaacttgcatgagataaactatgttaagctaggagctccttgaacaagtttcttcccagtcttcagcattttcatgttgttttgtgtgttttttttctattttttaatgttttctccccttctatctgataaaaatgaagacatctgaaaatctcttctatgtagtatcctaaatttttgttccttgtgcattttcagatatgagtgtaagttattatatttaaaatgggatgtacattagtctttctggacatgagataaatttcaaacataaatgcacatattgtacataacctaaatatgttcctatatgtgttattattaaaacactaaaatgagcttatatgaatctgacttcccttagatactttaaaatacactaatttctacccttcaaaattcattcaattcttataagttagataagtttgtttagctgactcactactttttcctttcttccatcttcccttctttttttcccacttttcttacttcttctgcattgctggtgacataaccaggaccttgcatgtactaggcaagtgctccaccattgagatatattcccaggtcctttacattgtttataagatgaggaaattcatggccattaatataaatagtttccaattaagtaagtcataattctagaaaatgaaacacagtaaaccaaatgatatatttacatttaagtgcatcaattataatttttaatattacttagggttcaaatgaaaattccaataacacaacagcaatgtcagcttattatagacaatgattcgtaatcaaaacaatacaaagtagaatatctgtaacccagaagtccaaattcggaaatagtctgaaatccatcatgatgtttaaaatgttttgaactttctaagtgtttctgactgagagtgttttgaatagatgctcaaaaggtgaagtctatcctgtcattccacaaatgccaagatctcaaattttgtgcctctaaaacacattggatacggggtattaaacctatacaaataattcttagataataaaataaaaacttataatatgatacagtctcaggcatcccatcttcctacgaaatatcaaaaataactagtcaacctgataaatcaattgtgaagaaaaactgaaaaagtgaatagaagaaaatggatgaataaacaaaggaaaaacaacagaaaggtgaaaggaggaagggaggcagataaagagatatagtttttcttagtactggttccacaatgatcaatgataatttataagcttaatgtatcaggtagccttatgctttcttaagaattttccaatttagatattaaatagttgcatttactaaactatgttttatatctaaaaatgttcagttactactgctgctcaaagatttccccagaacgtagggtcttcatgaatgtttattttcttcatagatgtgcagttttgattagttattggaacagttttcgtcactctctgttgtcatggctaaggggaactcaaggcatcctcagttcagggctctaatgcatgtgactaccaactgtggagcttggttcgtctccacctctgaatcctctcatgggctacttgtactttgggctttgacatagcacaatggctagttttaaagggcaagcatccagaaagaggggagaagacaagtgaaacccatgtcctttcatgatttaacatagagagttatagtcacatcagccacggtcaaagacctgcccatttgtttaaaaaaaaatcaccaacataatgcatgcaagatgtagttctgaagaattaaaagttacttttggaactgccaaacagcaacacatacagatttttaaacattttattctctgaaaaagttattattttatatcttaagctattctccctcagcctttgacaacagactataacagaattcacttaacatctgttgagaaccttctccatgccagactctgtggaaggtgctggcgagagatgaaacttaagtcacatatagctttgagatgcggaattttcagctttaaaatccatattaaccaaacaagcattgaatcacattttaaatttctctttttttttattccctggccaaggggtagtgtatgggtgtcttaagcaatgcggaaccttggagacaatgccattttattgaaatcacatatttggaaaataaacttcagatttttaaaaacaaggaaaatggaaccacaaattcttcttataagcttatataatacatacatttatagacttaaccatagccatggcttaattttttttttgttaaccagatagctttgtagtctttagtaagtgaccaaacatctattttccccttattcagactgtaaacaagttcttgacagccccagaaccattttcaagaactcggcatatttcagtgcagcagtttcccgattctcatacagagggtggccgcagcttcattgttttctaattctaaaaacatcatggtacttcactgtgaatgctaggtggaaattctgctagtaaaaataagccatgaatatcagataatttccatttaataggtgaagtttacaatgaaacttgtgttcttaaatcttgtgtaaatctcccatgtatctcagttcactactttagaaacttacaaacctttaactactgagtaacataccatcccctatatagagacagtgagagacagaagaaaaacagaactagacatccacccttgagcgttagtgactaagagtctccctgtcctcttgtggttttcgttttaatgagtgcaagtcatggtactaagggccaaaaacattgtggtgataatctgcagctaagctcttctcagctctcacaaatcccccttttggcttctgcatggaacttggcagccctgttttaagcactgttcacatttggcttactgcatgcatcccccagaagtgacatgagcacttcatcagtgtattcactattttaagatgtatatcagaattgtgtcatagaacctgacaaagataacaatctgcaaacttcctgtcccaaccactagccctctatttgactaaccttctaaagcatgtgagaaagaagaagaggggaaaaaaatcaaagttatgtagaagaaaatgtgaactcaaataatctgtacacaaaatgttgctaaacaatggttaaaagataaccaggggtgagattgccaaacctaccttgagaggctaaccacgcagtcatccacatcaattttaactatcatgtgcctaaagagagggtaagccagtctattgtctattgttaccagctctttccttcttcctcttctctcctccaatcatcagatatcatcgtagcttggtgaacccccaaagtccattctcctgtctcagttcctgaacactgcacatttatctagtactcaactatccatttgtcatcctgcccatgaatatgaaattcgcaccacacttatttgttcttttattctctagtacttctcattggaaaattcaaactgttactgtcattgttatgttgtcttttccctgaagtatcactggagatcctctgtctcacagttgtcactaatcaagtataatttcaaaaatatgtattgtatagaaagttcattaggacgttataggtgtcacctatcataagaggattgcttagttaagtagtagcaatagattacgaaaaaaatcagaatcaaatcaatatcatgtgtagctatatactgagtctctgaaccaacagtatagttatggagtaaaattatcaaatgaatatgaggtattcagaatatctaattataaattatagaaataatgatgatttctaaaagatgcagtaagtcatgccgttagtaattgtaaccataatatgaatcccataaaatttggattttatgtttgaaaaaagatgtcaattaacaaaatttaatatttaaattattcagtgatagaacaaaggcaagactcatgtccctttcatttagaaagcactgatttgaaatacatataaattgtctggatggagaactgggaaatggcttagaaaataaagtagttactgtgcaagcataaagacctgagtttaatccacatttcctatgtaaaaatatgggtgtgacagtgcacttccatgattacagcatggagaggcaggaacaagagggtcacaggagctttctagacaggcagaatctgttgaatttggttgaatctgggaactccaaactcagggggaagccttgactcaaacaaagatgaagaagtgattgagaaagacagctgatgtcaacatctggcctctacacataggcacaaacccatacaagagtcagcaagcacatgcacaaatgtacacatatacaaaataagtacataaatggataagttttcaggatgactaagctcttattatgtaaaagtaagaaagaggattaaataggctattgtgaataaaagggcacagataatgtaagaaattacggcataaaaaatacgtctcaaggttttgtcaattaaattcttactttatgccagttttattttttgttctttgtcaaaatccttgagttaaaatttacatgtgatagacataaaatatagacatgaacattaaaatttttccttgctacctggataggttgctgatttattttgcatgaattgtaaatttctagcacgtcaaaaattcaaacattttaattaacagtagtaaacagaaaagcattttcacatgtatctgcatgcatggttttctttattgtgtttctggcataggcaagccttgataaataatcatcttgatcatttcatttgttataattaaacaatgaagtgcatcagtagtagtaatcagcagataatcacatcctggtttaattagcatgtataggacacagccaagtatctctaatgccttagagtgtgattataatatgatggctgtacccagtaggttgtctaatttccattgtaaagatatgtaggtttttggtaatgaggctattctaaaaatgagcatttctctttctcaaacacatatctcaaacgtgatagtttgggatattcaacaagtttgatatgaaggttatctcttgcttctaatactttgtctttatcaatatccaaagacaatgataaaaggtaataagaaaaattcatcttatctaaatattcctcaatttatcaagattaagaattcaatagaaaaaataagccaaggagtaactggatattttattttgctattatagttttgaaatttcagccaaatatttctgctgccaacacagatagccatcagccttgtttttaataacttgacatggctaaattgtttattttcaccctaaaaagttagcaaggctacctcaggaaaacaattaaatagtagtggtaagtttgttgttacatcttttgtgtgctaatggatcagtcactttcttaaaatcacctcattaatttagatacttgtgttgcctctgtctaaatcaaaggaccaattggtccacttgacatgacttttgtatctttgaatgacaggcacttacaaaccaacaacttgagatcactgaaaaccaaaagatgtggtttgttttggaaatagttacttgtatttaggatgtttgaggaatgcagaatccaataacaaccatagctttttgtttgtgtgtgtcttttttttttcctctctttgttcttcagtgtaacagtgactacgtgcctgtgtgtggctccaatggagagagctaccagaatgagtgctacctgaggcaagctgcctgcaaacagcagagtgagatacttgtggtctcagaaggatcctgtgctacaggtatgcacaaatgttcctgaaatggactgtgagttcaatggttgaatcctattggggaaaaacaaaaaacaaaaaataaaccacaaaacaaacaaaaacaaaaaacaacaacaacaaaaagcaaccttctcgtgcatgaacttgggactccatttattctttggtacatcatttttgtgcatcgtgatttcttttatttcaaatatgtctgtaaaagagaggaaatgcatcagttcacaactggtatctttaaatacatatgttgtttactgaagtgcagaccattgaataaaatataattagaaatctgagttgagtacacacatatcaaattcatagatgaagtttctgtttgtttaatcgactgtttatttgataaacagtgctatcgtctagggttgcacgtttgtaggttggagttctgaagttaacaagttatttttgtggagacactaatgttagatttttaactgtaacatgtgctggttaccacttagcagatcatactgaagaatgcattggcagtgtgaataatttacactaacatctgtctttctgacacagttaaactcaggttctacggcactctttatttgtgttgttttaagaatgatggaaggcagtaaagaaagaaggaaggaaggagggagggagggaaggaaggaagtccacaattgtcttagcctttgggggtactttgttctattttgctgtttgtttttcttttccttcatttctccctctccccctccctctccnnnnnnnnnnnnnnnnnnnnctatggtgggggtgggggtgttacaacccagaaatttacaggtagagaaataaagcaacaacagataaaaagaaactgcagttaggtgaagcctgcttcagaaagcagtgctttaaaggggagccaagcccagcttaggccatgggcatcttaagcacctgccctaaataaacaaataaataagtaacacatcaagatcactatagttactttaaaaactctctgaaggtcatagttcaggaaaaaaaatgataatacaattggaaaacttctttcaaaaataacgaaacagcattagggaatcttctgtaaaagtccctctgggataacaggtttttctattttagggtgtaacatgagaagtgtgtgttgttgggtgggtagggtgtacaatgagtaagaacaaagtcttgggttccttggaagactgactgtcttcagtctccttacagttagtggtgactgatctttgaaggtctcctgctcattaccacagtttccagaaggagcaggggacaatgaaacaggagcatttctcagctacagtgattttgattttacagtcctttgatttttgtggtggtcttttaaggggtcttttctgaatgattctttgtccttgcaagttaatgacctatgaggataatggtcaggatggcaaggtcaggatggcctgtggtcagtacagatttgccagaacaggtcattgctgcttggcatggagtaagatgtgtgtgtaaaagtggaggcaagagtgcagctcagaggggaggaagaggaccagaagctagcctcagagtagggattggggcataggagaaagcactaagaaacaaactatgaaaataaatcagccatccataccaaaggacaaaacaataaagaacatctactttaaaacgaatgaaacagaaatacatggaacctttggacctcaggggggtttcagtgaacactgcagggatcagtaaaaagctttgtttatatgatgatccaggagggcagctgagaaacatgtacatcacccagtgagcactaacaggtagaaagcagtcatatcaactggaccagtagctgtggctatggcaaatggcatctggtaccaaaaatgatactgttttctcccaacctctgaattcctgtcagtctacacagtctgattcattcaagtctattcatgctagtctccagtgtgctgcttttactatgaaaataaatacttagccaagtagaaaatttaatcacaatcgaagaagctgtccttacctcatttgcatacttagatttctacaggatttaattagtcagccagtttagctgaatgcatcttctgttgactagagaatttaaaagagttttggtctgagcagtgatagagaaaccaagtgattagccaggcctgatggcaaaaaaattgtggatattacttttcttcatagttttcccatttatttttaatgtttcttgacagtgagttgaggttgcaagttctattctctggaaataagtggctggagaacattgaaattttaatctagaacgtggcttccttgtagccagtctcattgtcagcttaagttcttgctttgcaagaatgcagttgacgaagagcccagattcttgtccaatcgtatcccttccgtgccaggatgtgtctgcctctctgcaactttcttagtctacttatttctggcttgccgtgatgactcatcctacaattgagaaaacattaaagcttcccacaagtatttcataatgatgcagttgactacagtgcccattttcccatctaaccctcttttcttctctagctatttaatctgggtcaaatcagtcactaatcaagtggatggaatgaagttttagaaacgcatgtggaagataaaatccaaaacactcctattttttccctgacttttcccaaacacatatattaacgcaaaagcctaaagatcaacaggcaagatgttttctcaacattttaatgattgtacttcagactgttgctcacacatttaaagcaagctactattcacttgttaaacggaaggaataaacttcggaaggctgcctaggattccgcttgtcatttagcaaactggagcctgtgaacatgggtgccaatctctttgtgtgtatcatagtcaagtttagagggacaagcatcacattgccctgcctcatggaagtttctgatgttagtaagaaatgagcaacagacttcatatgctgtaagcatacagacagaatgtgatagtcccaattcaggacagccgcgacttggtcccttcacgtaaaagtagcagtgaagtaagctttcaaattaattcaaaaccaattaaaatattacgtatgaaagtgtgctcagaggaaacttagcaagtgttggccattcaagcacgattctgccccaaagaagcagtgttgtaactaatgagtgtgttctaactggcggagtatgttcttgttgcaaaaagaaatgtgttgagtcattcataattgggcattattaaaacgtcaaaccaaaccctaagtgttggttgtgtatttgttaagaaatatatatcataaatatatatttgttaagaaatgtatatttaaatatatattaatatttaaaaatatttttatattttaatgtataatgtataaatatataagaacatatacttaatcttaacacatgtccatatatatacaaattgtttccgtcaattagcttgcctttaggtaaaggatacgacccaaagtcatatggtcagacatgatggcagttaataaatggactgcgatccttgtataatacagtgttagttactctgagtcgccactaagacttactgttccactgcgttccgccatagcactgttaatgccacaaaggaggacatgttttatagactgacccattctcccccaagtgtcagctctgtggattttcatccccctggccactctatgtagtgtgtctccacaaaatctcaaagagcccagcacgaacaagaaatgttttacattaattcaactaaactacaaggaaaaacctcattgaggaggatttttatgtaagtcttgaatcctggatgcaattccaatgtaaaatagtaatagcatggctgaaggaggctaccaatgttgtcttatgacctaggattaagagtagaaatgcacaatgggatatcttttgaatgcaaagaaataagcagagaacggatattgtcttcatttaggaacagaaaggaactcaaaagtttggctcagagcagggcactgcatagttctggaatttgtgttcttagaaagagtcaccttcacctgcttgtactgactgggaagggagggcaggaagaagcacggtaagaaacagtgcaggtggtgttcctgtgccagtgtctcagcgtctgagcgtctcagtgtctgctccactacgagcacagagactaagtaaactcacatctcctcatatcagcagtgacgtcccggtagatagtgtggcatcgagcagcccctcatccccacaaagtgctccctttactctttttttctttgtttataagcaatgtgcaagaacggtattgtgtacactgtttagttgcgaaaatgcagcgatagaagcctctcatcatgtcgaagtctccagttcagcctggtcaaagtgaaaccagggaggacttcccatgctcgagcaggactttatttccccaaagctgtatgatacaggtttcataaaatttaagaagaaaaataatgtctcagaaattagattaaattgagaaaactgtatattagtagatgaagtgctacaagttttcccatcaatgacattttagcattgagatagggaacaagctaatggtgcgcgatccccacacttagcagatgaaggcagggagagcaaactgtaaatcatcctggattacaaagaccctgtctcaaaccaaaatcactcaaagacaaccaagagaggaagcctaaccttgaaaactagttgtctaatctatttttcaagtgagtatgaactgttttctcttttcttcccagatacaggatcgggatctggagatggaggtaggaggagttgctgctctccttttgtatttggatgtttctgtgggctgttgtgggttcttgttgatagatgctattccaaagcagtcatctaagagaaacctaaattttgggttttaggaaaggcaaactacatgacaagttgtcctactagtttagttgctgtatatgccatgactatttctcggtctactcacaaatcacacccatctcatttcacctcctccttcacgcacttccttgtgtgttgtgctgagtctgaaacagatagtgtcaaaacacatacaaagttgtcgacatgttttgtaagacagaaagacttcaggaagaaaatttttatatatttcattttttaaatgcataagaatgccctcaaacattaacatgtaaataacttcctatatcaggattttaagtctaagtcaagacatattagttcataaaaataaaaagatggaaacaaaagttaagtcaaaggtatcatgacattatcttttcttccctgatgaaatcaatacactgttaattttactaaaataagatatatttttgcttgctttcctttgttttgtttcacttgagaaggacccgctgtgtagccctggcagactttgagctctctgtgaagaccattctggtcttgaactcacaatgatctacccacctctgcctcaaaaacaaaaacaaaaaacaaacaaaaaaatttaaaggcatgtggatgaatattgtaacataacatgcccagccagctaagaagtaagatatatgttttgattccttaattctatttgaagaaatatgtgaaaggtagaaaccttgtaagtcccatcagatatgtttacaacggaaggaatactttatttttaccttaaatgtccttataaatatcctagatgcttttccaaatgaaattccaactaccacttttatctacacaacacaaataaagatcaaaacccaatatacagttataagattaataaaacaaaaatggatttgaaatacaaatatcatcgcaatggtttcttaggctgtatacattaattacattatgattctgtaaatagggaaggtgatagaactcagaaaactttgtgttctggaaactagagactcaatggtacacattttatgtagcttgggaaacttgagttttacagagagaaaggtttcactaattcaaataagctacacctggagagcacagagttgcacctcggagcccaggctaaagctaagcagtagtcaatactcaaacgcagactatgcttgacggcacagggcttcggacttccatctcgatttcaacgggctttctttacttgtaagaaatcaaaatgctccttcttctcttaaggtgatgaaaatagtactcaagaaatcttcccagcggctttgaaaggagatgcttagaaacattaagtcttcacataaaggtagaaaaagacagtgcctttagcttttccattgaaatttttaagtttcagtccattttttaaatcttgctttgatagtttcacgcaaaaattctgtacagtttctgagcatttagttttgtttgcggactaatctggcaattactctattgagacctaactattccactgtgcacccaacaagtcttgttcttttgctaacatgattataaagaaaacagaaatgattcacagaacacagagtatcttcattgtcctgataaatttccatcacacattttcccgccagctgatttccccacccagcatgcatcttgttttgcttttaaaataaaatttgtgtggtcggtgcaggtgctgcttcctaattttcagcagttgatatcagcataggaaaatggaactaaagccatgcttactttgttatttagttggttccttgtgctttcctttgaccagaataagaccttttgttttttaaggaaatcattttcctctcacaagtatgcccttggcgacatggttcataaaaagagggatacaccattggaaaacacctttcttttttcttttcaccaatttattttttctcctatcctgatgcctgtgctttttctttccccttaactattcttttcaattatagactccttaatagtagtaatttctaagcttaaaaaaatagttgccactattgttgagacagaggctcactttggaaaaagtctggcctggacagtctcactaagtaggttgatgctgatctttaactcagagcatttctcctgcttctgcctcctaaatattatgtctacagataggattttccatatctgaccgaattgatcaataagagatatttacttttaagctatagggcatctaaccctttgaatccagggttctcaaccttcctaatgatgtgacctttaatatagttcttcatgttgtgatgtccttgaccatataattattcttattgctccttcaaactgtaatttttctactgtcataaattataatgtaaatatttttggagatagaggtttgccaaaggggtcacaacccgtggattgagagatgcttttatgaattctgagttataatctttgaaataataaatgttctgaaaattttagcaatatgaataaaagttttaaattggaagcaaaactgggacattggccaaattgcttttctcctgactcataagttattgtattctatggcactaacaagtctgaattttacttaaactcttaaatagattagtaactccaatgacaaaatatactcaagctcagatctcatagcctttgggttgttaaagttggatttggcttactgactctaatatgcttagaattggactgactttttaataagagatccaaaaatattttagtagatccaggatcttcctttgaatggctgaacatgctatgcgttctagagtgagtatatagggacttgattatcttttcgaggaccttggaatgtcgatggttatttttataatatataatctgacagaaaggtcgtatgattcttaagaggagtgcatgggtatgactagtgaaataagcaaacgtggctgcatacatttgccatgggtaactgccatgagtaaaatgcttaaccctaaagaataaatttatttttaaaatacatcaatttttcctgttttagattggcttatgcttttaagtggatgagtatcagattagcaaaaaattagacatgattactttaagaataatttaagctttattgatatgcatagaacataactgtcatttactttggttgaagaaaattattatcataattaaaattcgtacaaggtttttataagattaacaggttatggaaggttttaactattttactgatcaggtaaaacattagaaatcattccatttgttatgaaatgtgctcactgtgtttccaacataatctttgctttgtattcatccacaaagagttccatggaggaggataaccacctcacatgaatagtaaagggtagttttacccatttcagcatctttatccttatcttctgctgttaaagaaaacttatttttaaaaaaaagctttacattgttagttttgagcataagagttatggagttctatgctggatcaaaaatcttttgaaaagtcatgagcgtcaaacattccgtatgaattggtctgtacttggaaaaaaaacattcaagatgaactataattttctgttttacgtgcaagaaggtagtgtgtggaccacacacctgagaacttgagaaagtggctgaatacgattagcaactcaagtgcccttagtatgtatatggagagttagtgttataaatatgaaagtggttgtgtaggagggatgatcacctcctgtatacccacagacttgcttaggcaacaaatactgcaagaaggaaaagtatttaagcagcctcctctagagatcgagggctgtgtgggtgctgagaggatcattttaagctctgcttttctgcatctttaagctatattataagcacaaagttttgaagatttttctttcattccttttcaaagtacttttggattgcttatactctcaccaaattcttaaagataaaagtccatctacaaaatgaaacccactcgtagcatctataatatttgcagatgtgctgtccttttatgcatgatgcaaaaatccataattgacttttaataacatctcctgagaggtctacagcatttgtagaattaaaaatataagagatacatgtatagacacaaaggtatatttttatttcatagggacaaggatgttcatagccaacatacggtactgtagggttctgcacttctagggaaacttttttgttttgtttccttgagaggaagtttcattatatccaagacgacctcaaacttggtatcctcctgcttggcctcattttctgatattacaggcacatattaaaacatcttgccaaggtccccaatgaagaagctagagaaagtacccaaggagttgaaggggtttgcagccccacaggaggaacatcaatatgaactaatcagtacccacagagctccttggaactaaaccaccaaagaaaacacatggtgggactcatggctctagctgcatatgtagcagaggatggtctactccatcatcaatgggaggagaggcccttggtcctgtgaaggttgaatgtcccagtataggcgaatgtcaggaccagggatgggagtgggtggtttggggagcagggggaaggagaggggaagggaattttcagaggggaaactagaaaaggggataatatttgaaatgtaaataaaaaaaatatctaataaaaaccaccttgaagcctagagaacttttaactagattaatattagatatgtacagtaacaagttgaatttatagctgatatttgtacagttcatataacttttaaagtaattaatattgtgatgattttaaagtagaaagccggttgatattttgttttgacttagtgaaaaaaaatctctttgtcagttgcctttatacaatacctatcaggtttgccatcgttaaacctttacttcatacacaatttggcaccaacaagaaaggtttacatcacaacaaaatataaattacaacctctacagctgaccaaatgggttgataaaaactattgtaagaagttggagagcgtgaaagttgttttcaagccatctttttctttctcatgtgaaagtggttgatttgaagtcttacattacctgggcacagtggcatgatttctgacatctgtgatgctagtcatgaccattttattctgctcagagattacatattaattctccttactgcatacaatgggaaatgttatgttgctgattatgaaagggaataatcccagcacaagtaaaatgttaaatgcactagagataaaataaatgaatattcattgcataaaaagcttttatgtaggagtaagtaattttcttttccgtgtttctgtactcctccctggcctcagcagcatttttgtgccttcttcagttactgtcacagtcaagtctggcaaacacaatttacttgggaaagatttttccccccattgggttcacactgcagccagagtctgacagataacaatagtaagcagctccagccaaaagagtgattcaataaagaaattccaccaattgcctaaggtctgaggtcttccaatgcaattcatctagggagtaatcagaagcaatgctctcttccatctcccacacccaagagctgctgctcttttgcctagaaatgagcacataaccatctaaccctcgattgaaatcatatctcaggcttttatggcttggggcccatgtttctctttacctcaaaaaaaaatatggaaatagactaaggaaagaaaagcagaatgagtgcagaatatgtagtggatgccaatattggaaataaacataagaaacaaacagaaggggagaaacaatgagagtggtaggaagacaattggaggggtaagaagactttgctgtgagcgtgggtggagggcagtttgttttcacatgtgaatatcattttacaagtagaaccgagtgttcttacaatagagcagtgatagtttctgaagttctagattgcctgggagaatgaaatgaatactacaagcttttccaggcaatctaattgggtttataaaaattacagggaaataaagttagtcatcctatagagtatggaagaaatgagtttggattcagcatccggagactggaagtctagatttttaactggcttgaaggatatctattaacatttctttctttttttttttatttttttactcttagtctccttagagagtgattcatcttattgtttaaactggctcataccacttagggaaagataatcacaacaaactaaaacctagaactttgaactctgggaaattagaactagagttacagaaattcctgctacctttttctctgactcctattttctctgagaacataatttctatgaggaggcaaactagaataacaagttgtttaactactaatccatggtttaaaatggtgactaggtgtgatggtacaagcttgtggtcctagcatgttgaaaagctgaggaatgaggatcaactgtactacacagcaagttccaggtcagcttggcctacatagcaagactctagatacacgtacaattacagtaacaatagtattgactctatgataataagtatgaatccaatagtttcctatagttagggagacagtcaccttttcatctagaaagaaacagaaattacaggattgaaacatccaggagaaactaaaatcctacaagatatggaagaaagaaaactgatttaaaatctctaaaaattaattgttctcaaaattaagtggcaggcatattgcctccactgaaaaccaaataaagatgtggaagttcaatttggtctattcaacatatttacatgaaaatattatcatcaggccggtaagcactgttatttttctaagtgactttttgatttctagaatataggtaagaaattgtaccccagttcttactaatgtccaaatatgaattagttaagtcagggagcattcttatataattagtcgtaaacattttatggtttacaaagatcacagtcataatattaataatagatgcaaataagaagaaagaccatcctaaccatagcccagtgacaatatctatggttactcacccagtcctcaaacttcaaaaaagaaggaaccatagactgcccatgagagcagtgtttttcagtcactacaccagaactcatttcctattgtaatacaaataataaatcttacccaaactcttagggaaatttattatcccattttcttagcctcttccattgtcactttttctcttgaaaacacctgttccttttgatgcatgggttgagtctgttgttgtcggttacctgttgtgctctcgctctatacattatgattagtatctattctcttctcttattttctcctctgttctccatctcatcttctaaacattttctctctatagtactgggtagcctttaaggttttaatgaaatatatattagaaaaggcagaggttcacagtacaacttgaggatctcggggctgtgtagactgtattggaactttccatgtctagccgtactgccttgagaaagttacttagatttgtttttctcatctgtgataggcaaggtttttagtcagagctatcgtgaggttaaaattgggtgtgcctgaagtttagtgaaggatgccttagaataatagcatctctacaaaggaatggtgtcaggataaaaagaaataaactataaattgtacagtgagataaaagtcagagaatagcccaacctggagtccccaagttgagaggggctctgcgacttatcctcagtcaagatgatgaggtcaggcctttgtattctactactgatcatctctcacatgggcaattcacaaaaggtgctgaagagtaagccagatggttatctttggatacatatctcacacacacacttacatgcacacacactcacaacattctcacacacatactctctctctcacacactcactctcacacaatacacactcttacacactcacatagacttatacttacacactcacacacaaaaataaacaaatttaatcttatcttaagacggtaaaatttttgttgtttggttgttgttgattttgaagaggctattatatgttctccaggttctgtatgcgtccttgtctgtcctcgacatgcccatctgctacttttctgatgggtgttgcctttagtgactaaaaccctagtttttatatcattaactaaaacattcattttaataaagattttatttaaaattaatttttactgatttgatagttttaagcaagcaaaaaattcttttatttccagacaccatttaagacacaggaatgtctctgcatgctgcaatgtatacctaacctcattgacttggtttcaaatttggatttgaaaatatagctttttttttaaactgtactagatgtacatacatattgtaccatatgatttccaatgtgtacttaacaaagaacaacttcattttctctggcaaattatacacttgctgtcgcagagggagtctaaaagaaatccaggaatacactgaaaacaatatatttaaatgttagcatcctttttccacaagtgaagcctcaagagttataccagtactcctcagttattgtactgattctgaaaacaaagaaaacaagaacaaacaaacaaaccatttaactgtggatttgttggtagtctctctcagagaaaaccaaaggaataattagctgcatatgaaataatgttggctctgagaagctgttctgtggatcaatcatttcaactggtccagtcttgctgggttaaataatattggctataatgcaaactttccctctcatttttccagttgtatctactgttttattttagggcatggctaattgggattttatcctatcattttcttcgcttggggaaggcagcagacaaaatatcttattggtactgtcagttagaagaggcaaacctttcgatatctgcataaaatagagtatgatagaccgtttggtcccagctctgttgaggaaagtttgtggtcatgtgagcagacagtggaagagagtgagcaccctccagtcactgactgtcccctccaaagattgtgacacacaaagcaaactaagtcctttagcaagcatgattcctgacatattgatttaaaatgcttctggcagcaacttcctgacacattgaaaacaaagtaccatcatttatgacccttcataatgcagtatgtgatataattcttaagagttggggagttttacaaagttcagaattttgtttagttactcaaaagacaaccatcattccagcttgaattgggcagtctttcaatgtagatgtccataaactctcctagcctttcattggaaatgtaaatgaggaaaatacctaataaaaaatttttaaaactcccttatgccaggatgtgtcagagatagacagcaagttcagcgctatatatcaacacactgtggattttctatggtgaggagttctcagatccatgtctcaagaccctccatcaatctcccatcttagccccttggcatctcctgtctataacactggaaaatgcttcttagcaggaatatctgctcccacatatcttactcctaaaaatttcttctaagcacactgagaatatgcatagaaaatgcttagataagtatattattcttttgcttaagactcagcaatggctttcccatcttctttagattaaaacttagtggtcacgttaggttttacaaaaacttctagcatcagtctattgtcttctccaacatcagcatccgtcttttttatcttagacttggctcatgagtgctctttttcactagtggagaaatccttctcatgtactgcctaaatcctactcatgtccaaaaataaactgtagattatagagtttttcaggatttccatacattctgatcacagtttggcaacttatcaggcttacaggggccttgtcgagggcttcctttgaccttgtagaacaaaggccaaaacactggctgatttttttaaaattatataatcatatatatatatgtatatatatacacatacatatatattatacattatgtatatacatataattatatacatgtttatgtgtatatataatatgtgatacgttttataaaatcaagggtatgttttgtagagagccaaggatatgtttgagagagcttggtgtggtgcagtgggaggggttgcctcagaaggcccatgcttaggcatcctccccgtgaggtaccagccatatgatgggtatagtatagaatagagtttatttgggaacatgaagcggcaagttgagaagagagtagaggcaaataaagagagtaaatagaaaggtgaagaaagacagaaagagagaggaggctgatcagaacatgtggagagatggtgataggggaagaacaaagagggagaagggggtcaaagaaagcagagggtgtcagacatagaaaaggggcagagagagcaaagagaggacaaacattctcttttatagtaagccaggcctacctggctgttgctaggtaactgttgggtgaaatctagaagcaatgctaaagatgtgtgtgtgtgtaacattgtatattatatacacacatatacattatatacatatgtgtgtgtatatataattgtatatcattatgtatatgtcatacatatatacatgtacatatacatagtgtgtgtgtgtgtgtgtgtgtgtgtgtgtgtatgtgtgtgtgtgtgtgtgtgtgtgtgtgtgtgtgtgcatgcttgcaaaggcacatgtgtgtgcatggatccataacacagtgcacacctgtagaggtcagaggaaaacctgaagaaaatggttcccttcttctgtcatgtggaattttcgagaatgaaagtcagtcatcaggtttggtggcaggagtctttgactagtaaaccatcttactccttgactgtcttgtgtgtgtgtgtgtgtgtgtgtgtgtgtgtgtgtgtgtgtgtgtgtgtgtgtttgtcccttaatctactttagctaagacctctgaactttggctattgaacatctggaaggccatttgcaccagttcttaaaagaaacccatgaactacagttttaacttttgagtgtaaacatttagaaaaagtttgtataaaaatacatagattttaaaataaatcctagctttgttaaaaactcaccttcttaaacttcttgattgaaataaacacctcttgtttttgtgtattatatccacaatcacagtcatggaaacaagctatgtgtaagacctatgaagtctctctaagagctttctaagacaaccaaggccttgatagtaatgtcaaaaatgccctcattcctgaatgtttcctttcacattgactgctatagtttaagttaattttttgaaggagctaaatatgaaaggcttgtcatactaaaagaactatagatctattttaactttaaatattaaatagcagccacacaaaaaattactgtattttccctccaactctctctttttaaaattctctacaggtgtcttttgtctgagcagagcatggtagccatgcttcagttttagttatggtgtggaaacatagcaggagaggacctgaggaatatggcacagacatggaacaaagttaaaccagaataagtcctgagaaataataaattcggaaataagcaccatttttcatacccaggacctaaaggatgtcaagaaaaccccatggaaacaggacatatctcctttgaaatttatatacagtatatttttactagtttcacagtagtatctccatgccatgttcattctggttctccatttccctcacatgtcctttggacctgacagcaggatgtggacctgttcacttgtgatccatttcgttttccaacaagcagtgtgtgcagaaaaataattgaagttagtctaccactcaggttagttagttttgaggtaattgagttgactttgccctgtgagaatactttattcaatagccaaattacttattaaaataccaaatggctttagccaaaaaaaaattagtttcacttggaaatccatttgatgctttcatttgctttggcattgaatcagtggagagtgtggttgggtttccaaagaactaaaatggataccttacatgaatgtattctgacaaccaaataatattacttagaaaatgggacattgattattccttacatccagatagtctctctacataatgaaagaaagtgtagcactctgtgatattctgctttaatttatgaaatagttaaagcacagggagaatggagcctctgcacgatgtgagagtctagtacaaattattttagaggaagcatgtcatcattgtcagactggaagtaaagactatccgcacagcctgagagaatagctccagtactggagtaggtgtctggtgaatgcaagatgggcacagagacaaatgtctctcctaagtcctctgtccttttgctcctttgtcaaccaacttaaagtcaaagcacatatctcatcctcatgtttttctctcccatcaatctcccttcaccaggtgaagagtgggacaaggttgtaatactgtacatagctagaaaagatgcccgagatggataaaataaaaggaccgtttagaagaattacaacagcaacagaggacttttcaatacaaaatatcacagagaaagcagtgtgctcagcattttgtagaaaagtttcagtgttctaacggtagaattttaaggtgtttcagagttgaaaacactatattggttttatacattttaactcttgatatttcatctatattaatgatacaatagcactaactccatttgattgttgctttgcttgcagaacttcaattgtcagaacaacaatgtgctctaaacacatttttcctagttttactaacacacacacacaaacacacaaagagacacacactttgtcactcatcactcataagaactagcattgaatgttgccagtatatacttcattaggaagcataggcttcattcttagcaaacagagtcatctgagtcaattatctagagtgcagagtgagtctagctagacaatgtcctctaaccaggcaatgcaaatgggtttctgaggaatagaaaaatctgtgggaactgctgtgtcagaggctgtccctgtaagtgagggtgacttgactcctttttaaaattctcatataggttgctaactaagtgtggtttgcctcgaatttttacacttttagcacttgataatcttgctccagggaagaaacatgactgatcactttatgccttactcatagatgtgaggctgcaaagtctcacaggcagggtggtgtattttgtttgatctttctctcactctcccattcctccctccctctccctcctctctctctctctctctctctctctctctctctctctctctctctctctctctctctctccctctctctctctccctccctccctctcctctccctcccccttgtgagtgtttacacatgtgcagattaaaaggatatgaacaagttatttttaactttaaaaaatccattcattatcttgatcctagttcttcccttagccccattctctcaggccctcattacctccctacccccctcacccaacttcatgttctttctctctctttggctcaaaagacactcaaattctaaaacaaacaaataaataaacaaaaaatatttttgaagattatcagggaattcatttgtggaatttttcttcctgacagccaggtatcaacgccttggtgaaagagagttaaagcaaaatgtttttccatgagacatttccctgggatgtggtaccaagaaggacttgaactagtgtggtattctgaatgggctttttcaaatgcttgtagatggtatatgagaacacacaattgcagacattggaaactctcatgtttgacaattctcctggataacaagcatagaaaatgctaaaacgaagaacagcaaggcgctaagttcacacttcttatgtaaatgtggaaatactttacttttcctagctagttttctaatagtttgtctttaagtgaaaataattattgatacaacatttctgatccctggttctcctccctgaactcctcccatatatccaaatccctcccaactctccaccgattccactccaccttttccttctctttagaaaacaaacaagcaaacagaaaaagccaagaaagcagaataaagaaaaaacacactcaagcaaaactcatgaaaacctgaaatttcaaacaataatatacggtcaaacagccagcacttggaaaaaaaaatgtgatatgagacaaaaagcctacataaatacaaagtaaccattgaatttacttttgttggccacctatgctgggtatgggtgcctgcccttaagtgtacttaatattcccagtgagacaccagtaaaagatattataattattattatttcgcaagcttgtatcagttggagaaagcttcctggggaggatgaagactcataagcacttccctgtctggacactgggaccccatccagcttgaacctgtgcaggcccatgtgtgctgccgctgtctctgtgagttcatatgtttaaacctggcatggtagcacaggcctaaagtcccagcattctgaaagatgagaataaagacgtcacatctgagagccacacaggagcatagagacattctatttgagtaaacaaaaactgaaaggaatcaataatcattgcacactttggacagcactactcctgctccaaccatttgttttctggctgctgtgttctaagtagagtcctctctgccacagtgggttccagagcatgtggagacatgaatagctggcctgcctactgacagtgccacttaagcttcagagaaaaggtattttaagttagaattttgaaatttaattcctatacagaaatattcttacaacagaaataattctcctttttctagatatttcacaaaagtttacttgtctttgtgcagatttgtggggcaattctcctctgatgatattgtagaaatcaggtatgaaggagggtgtgaagtggtaatatgagcaggaggcatacaaacattttatattttagccaaaattcacattcagagctatttagttacacgcaacatatttgtagtttttattttttaactcttttagccagtaatcaagaagtccatctgacaaaacatgttagaaacactgcccatagcatcaggaaaaagaagccagtgtcttcattagcaaaacagctgtacacaatgacacccatgacattctggatcaagactctgaagacctgaacttacacaagaggctctgttattctacacagtgttccaaatatatttgtttattccaaaatttgcttttatttacttatgtatctgtcttggtaaggggagagagctcctgctccacttcccctctcaaccctgggaccctgtctagttgaaacctatgtatatccacacttgctgccatagtctctgagtagcacatagatgtgtgcttgtatatgttttactttgaggtcaacaatgtcaggcatcttcagttgctccccacttcagtttttcagtctcttagtgaacctggagtttgccaattcagttagagtgacctgtgggcaaaggcccaggaatctccctccatctgcctctttcgatctagtcttttggaatgagatcagggacacatcccttaacaaacttagccatatctccagctccaaggcttttcctccaaatgtagatatatcttcctgttattttctgaatagtgtttatcactaaatatctcaaaattaaaagtagtattcctaacattcttagtatacagaatttatagttaatgaaaatgaaatgacttttgaaaaaccttctaatttttgtgtctctagtataataccatgtggaagaaaaatacaatggttatttaatacttcttgaagttattgggatggcaaaagtgtaaataaaaaagtgctccaaatgttgcagccgccagcagctcgcaacatgaacggttcgactgagaaggctactcgagctgtaagagaggaatctagacggggcgaaagaagaaacggagccaagacaaattcattctgatcaaagctcaaattttattcttgggacactagttataaaggaagggagaggggacctgattcccgccgaataatctcgggtccagtagaaaggtgcacgtgtgtggctcctcaggttccagcagtgggcgtggcagaacgaatgagcaggaagctccaccccgagcaagcaggtttcaggctgggggaggggagactacatccaaatagtatgttaatattaagcatgataccataccttcagattgggcaagtaaaaacacatgggtgcatattatggtctgattatttatagtcgtgtattaagtaattggcatgattcttcagggaacatagatcatctctattttcgatggttaaaagaagaggcacaacagtatttgttaaacattttcatatgttgtgaggaacaaagctagcttccttgggctctgaaatttctttttacttcattgtttcatgtgtaggttgttgccataagttgggaaattaaaatagaatgttgcaatatttcatattaagcattattaatgtgattgggagtagttattactattaaatagattttcataaatcagcaaatttgtgtgatgtgacttggacataagaatgcatggaaggacacacatacacacacaatctggtagtattattgattatataatatgcattctatttttctttgtactttcttcgtattggtgacattggctatgccatactttgtgccaaccaagtttaagagacaagaaaaaactctgagtaagaatacttcagagagtaacaactagtttacagaaaataaaacaggtgctataagacaaagtatctctcttgggagaaaaaattcaattttattatgagaaagagaaatagcaggtaaaggtacagaagcaggatgctcccgacaaatgccaagtccctacgtgtagtcacctgtattccatgccctgtagtcttgggcatttggatacttagttcctaattggtgcatccttgggctaagtcctagttgtggtgtgtcctaggtcctaagaggtgtgtccttgttggaagaggtatgtcaccagaaagagagttcagacctatgcccactcaggtatgctctctctgcttcctgctttctctgcctcctgcatctgtgctgcactcctctcatggattcttctccttctggaattgtatttctcagtaaagtcccttctgtacgttgccttggtcacagtgtcttatcatggtcatagagaagtaactaatacactctgcgagctccttgggaaatacagggcagagggagttcagcaccacagcacttgaccagaaaaccctcagctgagtcgtaaaaaaaatttgtattttcaccagggtcattaaaatgttttaagggcaatcttttttttttaatatgtttaaaatactgttcaggcctccaggtggagaataaattgtatgtgaagcaaaattgaagcaagatactaacacaaagattgccacagtggaacaaggcagagtgagtccacacaacctgagtgttggtcaaagggccagtgaggtggtaacaaatactttctgtccatttagatgctagtatgggtgtgaacaagtgttacttgccaaagtaaggaagaacatggatagtcaggaggtagatacatgaggatcaagttcacatcactatccaagtctgtgcaatgagtctttgcctgactcagaacaaaagaaaagtatgtggaaagggtaggaaggatgtcaatagcgtctttatctcatccatgttcgtcacaaatcaacattactggtttaattttaaaacacaaatatacttcataaagagcaccattttaagaaccaaagccctcgtgctgagcccaatatactcatcgaaggcaattttctcagactttgagatgcaaacacactgacgtgcttaggagttttcagttggttgcttttcaataaagcctgtgtagtctgacgtttttgtttttcatttactccttgaaatttatcatcaacagtttcagcatcatccccggtatggcagtaaaaggtaaaatacaataacagggaactcagtaatttggcttttaaatggctttatgcatttatgtgctatgtaggctatgtagcagattgtgataacagaatcagttataatcaaagtgcagccgtacaaatatagcagacaccttggaacagctccctttgttgatcgagacagagcaggagtgccatcttacactatattttctctataacagcatagcagcctcaacacctttgttgcgtttccgttgtgctgctattgcgaatgtccccacagtagcactttacctgtatttatcattgattcttgcacattgaattttctgctctgcggacaactaatttgagtggcttgaagtataaaacttacagctttccccttcattgtcccagttcacataacaatatagaagtcatttcccagtgcagaaaaccccaaggccctcagactttgttcagcctccgtggtgctacataatttattttatttctctgaagcctgcagcgtttcttatgtgctgttaagggaggggatccattgtcagtgtgtaagcatcacttcaattaagctctgctggcttctctgtctgcatgcgaatgtgaacttggttgtcttgagaatgacagttgtttattttactcatgggtgtctgatgctgggtggggacttacaggttgactcaaatatttataaacatgtcttttgctgtctttcgtggagactattctaaagttaggggaggtgctttttatattttgttgattgtttttggttctcacaaactcctttagctttctcttctcttgaattctaaattgcaattcttgttttatccagctagtcccagaaactataacctggtttgattcctgaagtgggaataatgttgtaccagtagggggagctcacaccatgcctattttatgggttggtttgaagttaattttgtggctttgtatccttaagggtggagccggtttcactttaaagccaacagtttctggggtttggaatataagttatttcttccagttgaaaagttaaaataatctgaagttgtaaatcttaagtgcgttaacagtttaagtctttagctaacgaatcgtcatactgtggttgaagttttcagattgctgaaatgtagaagctttaaaatatactaaaagttctctttctttgtgtacatcctcaaatcacttccttccaggaacagtgaccacaggactcgggctgaacactttttgtgctgatgactgtaagtcagcataaacaaggcagttgctaaccatggttgtggatgtaaatgtgagcttagttttttcatagatatccctggagggatagatacttggggctatccatatttctcactaaatttgcatagaatggagttggaaaggcatacagatctcaactagctctgtgctactcaagtcagcaaaggactcagagccagtatcattccaataccttttctttcccaagtttgttatttttgactctcctttgagatgttagcaattttccaaattctgcctgaaatttcagtctctaagatggtgaacaccaaacacctcttcatataatacgtttctgcaggcatctaatgtgacctcagaaaatggaaaagggagtagcatcttctctttgttccttttctccactcttgaacatctgtctaatgtcatgcataaggatgcccaagactctgctctgcccacagcaaactcatgattcagagactgtaccattcagtgaattgggagaaggaaggttccagcgtgtgttttcttcatcagaataagagatcacagttgtctccagactagcccatgaatttgactttcaaagcatccctgagtcaagacagctgactaattgctaacattatgcctcataaatctgaaagtctggactagaaagtgtgcgatgcctgcctcttgatggacattagttatgaaatcacctctgtcatagaattttcatctaaatcactgtgctgtttcataggttacatgtggttggaaccctggtgtagaagagggagagataatggagagaagaagatgaggtgaggtagaagaggctattgaaagtcggagaaaggttctcaggcatttgcgcgtttcctccgggtgaacgccacaattgtctagcaatttcctagcaataaaatagctgtcctgtggttgatgagcctttagcatgacagcgtgatgaccttagcctggattctcggattttaatagctctgtggttcccatagggtgaagctctttgctcattgctttctttggcttagactttcttctctgtcagtgatcctcctgtgtactgttacctcattagtgcttgattcctagagcatcatcactgctacaatgtctctttctgtatcacacatttattttagatggcataaatttaacaaaacaagttgttctgtggaccctgtaatcttacaggagcatatctatcacagcaatgcacagagtctaggaaatcacagatcatacctggcttcaactccagaacccctggccttgtagaacaaccacatttagggtcctacacatgatttggcatttgtaataaaatacatttcttttctaacgaagtctcattcattctacatgtttgagttccacaaaaatttagatctattattaagtttggtgtctgaatattttcctccctccactgccctgctgctgttctagtggctgtggttatgtggttctgtggggaatctactaatgatccttcggttaaatatattttagtttcccaggcagttccttagttcagcattgtaccagaggtcaagctgagtggctttaatagctttgtcaataaatcttacaaaatgtagtatcttaaacctatatcacttatatagaaattataatatagatattacagcaaaatactcaaaacatgagcagtatttgcaccaaacaaaatggtattacaaaccattaataatacttatcaggtaactcatatcttagccttagctgttgggttgatgttaagctcttgtgaagtcactcagtgctttgtgaaaccttcagttcccagattcattagattgcttggcttcaggaatgtaaggctcttagtgttttagagagcagttcaaacacagcatcttgacgtgatcttgggagactgtggcaagaagatggcaagtttaaggccaaactgaactggataacaaaaccctacctcaaaataaatcaaaacagagaagaagcaagccaaaaaaaaaaaaaaattcctttcccaaggcagtggcattatataaagactctgcctgctgatctcttgccagccatggagcctgtgcactactgcagaggcaatgcagatacagtgacttcatttgggtttattgcataccattaagtatcctttcagaatgcaaaaatttaagttcttagttcagacttatatgtctccaaaaaaaccaatttagctagtgactgtcattcatgaattgtacagttggtagactaggcctttgttcaagttctgggaatagagaagtgaaaaagctaacaattatgatagtgtgttggaatctggtgaagtagggcaatgaggtcaaagacactggaagaggaacaaagaccatcaaattatttactttattttattgaaacagatatacaaagttttagtacaaagcagcagggataggcagttgctcaaagggattcctataacagcactttgaattatcatattttattaaatgggagggccaggtcagctatgcaattgcataaactgaacatgaaatcattaaagattaagtcttctgttattcatatgggtgtcacacgcatagcaaaagtagcacatttaattcccagaatcactggttcatcgtaaagatgagtcatgttgaactaaagggaccatattttaatgaaccagtctggatactgaagctcaactctgcttagcagcagacagcctggggaacaggagacaatctatttttcaaatgaaaaattagtccccaatgctgtccttctgtcttaatttccttcttagcactctgtgcattcttccttcttatactccctcttgccttggggtttccttaaaaacaaaccatagacacagaacattttccattcttctgggtgggattccccgtgtggcatttgttaaccaatgagcaccagcaaatatttgtccgtatacctacagtttacccagaagctaatatggaaaatgattgcttgttcttgggggatgcttttatactctttggagaagatgaaaacatgcaggagtggacttttcatttcctaagcatggcatgccctacaggaaagaatagtccatacagggctgtagccagtagggaggacttcagaaaggagggtaaaatatgagacaaaccttaaagggtcatttttgttttgactaattcgacaaattttatcatttttcaattttctacccttttgaaatatacagggtaaaaaaatcttagaaagaagtacataatgtacccttgtatttattgctccttccaacaaatcagtttatgaaaaattttgctctgttttctatgtctaaaaagattcacgtattgaaaccttggttttgagtctttcatgggttctagatgtaataaaatattaagatataaattttagtgtcagtgaaaaatggtagagataagatgaaaaggaaatgctcattttcagtatttttatttaacaatggttaactgctatggtttgcaatattcttatgtaaatctcttaaaggagatttgaatatatgattttctgctgagcacctttaaattatgttgataaataactatgaggtctggggatgtaacttagttgctagccctagggatggccagcacgtcatgaaacccaggtgatggcacatacatctaaatggagctctcagaagagcaggaggctcagaagttcaaagtcatcctatattaggaagggtacttttaaatgtaagcttgctacaacctctaatcaccttcaaggagagtctcaattgagaaattgtctagattaagttgccctgtaggcatgcctgtggaagactgtcttaatgttaactaaagtagaatactacagcctactgtcgacagcactattccctatgcaggggcttctgaactacatagggaagcaagacagaagcacaggtgcattcttatctgtgttcttttctgcaaaaatactgtggccagctctttgaattcttgccttaacttctcctcaatgataaactgcaacagccagaggagcccttcctcacatacactgctttttggccaaggtaattaatcatactagcagaaataaaattagaacaagtatatattaagtttaaggcaactcttgtctgcataacagagagggaatagagagaggggctgaaggagaaaggggaagagaacgaaactgaaagaaaagagtagaaggataggtgtgagtcagtttattttaataatgtggttgaaaaattaaagataataaattcgggggtctctaattttttaatatattaaagctacaatcacagaaacatctatagaagcgttgaccttaaaatgagtactgcagttacagtttcacagtaatgtcatcaatggcagtttttgattttggatttttttctgttttggcttactggtcttttgcttatatattatgatttctggttttgtatttttatgtggtgtgtgtgtgtgtgtgtgtgtgtgtgtgtgtgtgtgtttgtgtgagtgtgtttctgtgttttttatatatttttttattcattgactgtttctttttctaaagagacaaagaaggcatggaattggtgagtggggagataaggagactctgggaagagctagaagagggaaaaccatgatcaaagtatattattttcaatagtaaagagaagtttaaaaaatctgtttcactctttctataaaagccaatatacaactatgcaaaattcctgtgtcaatttgaagtagacatttaaacaagtaagctattatatggctagatcatctgcttcactcattcatatgactcatactaggaaggcatgcacaccttcataagacacacactaggaaggcatgcacaccttcataggacacacagttggatgcacacacacacacacacacactcatagtatcttggaggtctgctcagtggagcagtatcttgcctctaagaaatagtcttcagtatagtgagaattctcactaagaattctcagttaagaatttagaaaggtcaagtgaggcagatgaagtagcacgaatagccaggttgatataggagagtagagcctttccagggagcaacagagagttcagcttagctaaaatgtaaatgcaagaataaaaaggtaagaatgacactaaaaatcagtcacttttaagccatatgatgaataagtattctcataaattctttttattatcaaaggttttatagatttggtgtttgtttgggattttggttttggttttttggcatggtcaataatcaaatgttactcatttctctgggggtacttttattaaaacctgggtgatggaagcaggagcaacatgtggtttaaaaaaagcttaggtgcatagaataaatgtcaagaggaccatttattcttttttcttttcttttttattggatattttatttatttacatttcgatgttatcccctttcctggtttccccttcacaaacccccatccctttccccctccccttgcttctttccttcttgtgaattatatcttcttttcatacacaatagttaatgtagcacgtagcttctactaccctgctttaagctcctggcagatcattctgccagcccccctcctgtgattcccttggatctgtgatgaaagacacacacacacacacacacacacacacacacacacactaacttctttttcacatgtgtttagctcaatggctgggcacatctaagcctccctaccactaatgtgcccttaccttcactgccagctcaacacctctaaatctgccctctaacatagttgctcagttacatttagtcctagctcaacaccttgaaatctgccctcaatttagttactcggtaacctttagttctagctcaacaactttaaatctgtccttaacctagctgcccaggtactttttccttgctcagcaccctaaatctgccctcagcttagttgtgtttctaatctcctgtctgctactccaggccaagtcggagaagcggccaatggccacttcccatgagatcttacatggctggctgctctctccccctctgaagcatggaggatcctttgtttccctttttgtctctcctaatcttcgagagtaacctagaaatcccacctcttcttcccagccattggccataagcatctttattgattgatcaagaatgagttggggaacaggaccttcagggttcacatgagcatccctgatcaaagcaacagaagcactccctacaagttaagaaaatagggaatctttagaaagattttcttactccatagcccatcctaccctctaaccaagagcttcctgcctcagcctctgcactgctaggattgtgcgcatgcatcaccacacacaatctttgaatatgatttttaaatttagtttcagtttattaacttgtgtagtgtatgcaacaatctaaataatagccattttttgtccctactttacacctggagcacttgagaaagaagaaaaatatatttgtcctgtatttgcagtttgcttggaaacagaaatacagatttgcacatgattatattaatgtgaacatgaattccttgtagtctaacgtgcttttacaggacattatgcatactatatttgtgattgaatactcactattcttaagtaatttaaaaatttaattaaaccatcccaaatggtggctcaggaaaattattgactcccttacattttagtagccgttctaaatattctggaatcgacaagaaaatagtttttaagcatcttgtctataggttcatatacaagctacatttcagtctatcctcagattaggttaaaggacaagtagggacatttaaaaatctctgtatgagacaaaatattcaagtgttactcagacatattttgtcataaatgttcgcatttcctggccttaattccttctcttagaagtgaacagtttggactaacgatcccagaggactctctgcatgtctcatgttctcttagaaatagagaacatttagttctaaatatacacatgctatatgctggctttgaggtgagagaacagtctaagtgtgattatcttataactgccaacttcaaaatggaatttgagaactgcagtgtttgtgtttatttttaagaactctcatggcctgaatattcctagaatctttaggatttgtaactggtgtaatagacccagtttataaacagaagcctgttatttaaaaacaagttaccagggtgtttaatttttatataactagaaataaaatggttaagactacctattgacaacataatgagggactttgttatgggaggacgcaggaggctgcatggatcaaaggttcagactgtttcacagtatagagctcttcacaggtgaattctgtctgaaatcttaattttcatatctgaagttgtatatggtatacctagaccaatctctgccaacaaatgcctttagcattataataacattttcaaacattcatctttagttattgtgtgtttctgattcatgcatacatgtgtgagcacatatcatgccacagggaacgtgtagagttcagaggataatactaagggttttgcatctcctcttttacaaaatgggttctgcgcagtgcttacatcttcagatatggtggtaaaagcctttgcctgccaagctgtcatgatgaccagagatactttttcaactaaataatttgcataattagttaatgaaataaataagtttgaagacaaatgctgagtgctcacgggattttgttatttgttttcaatgctccgcctataatgttcctgaagtacatagtttagattaggggcctaatagatacagcctgaaggaacaggtcaagagttagggaaattgaagtttctattattttcattttgttcccaaaacattgccctgtgtttaatttttcccaagtccaagagcatttggcaatatgttatcagccatgtagcatgaacagaaaaataacatcttactcctattccaacttttatttgttatgttaaacagaaatatctcaacattttagacaatttcttatagatacaaatgtcaaaccacattatttttagaagagaaatatcagccctctatttatttggacatctcatgggacttggcacttccctttgtttagtagcagctgtattgatccagctgctgcagttgctacttgggcagctgctgggtaccattgccaagtgcctcagatggttttaaactgatttcagaatgaaatccatggattccataaatacttacaagcgtcccttcaacgttgtccagttgcagggtgtgacctagaactatggattccaaattcagcaatcctttccttccagccataaatcaatgtgcatctcaaatagcttaaactgggaaaatacctcctgctcaggcttggatttattagcagggtttggaaacatagttgtgtaagccaagtgtttccaagggtttctgcagtctttatcttactttacttaacctgtactttctctttactctttcttctcacagacactctttgcaaatccatgttgatttctcagagtgacaggatactacctccattgatgaaatttaatcatccctcttttaagtgctaaatggcaacagcatgaacatacgtgtcagcctccatcttcatgttgattcaaacataatacttcatttaaattttttttagatacacagtcttgaaaatatgaagacacattctataacataatgccaaaccctaataatagttgttgccttgagattgtattgactaaagaaaataagcaagtttttgtatggttattttttagaaagaattattatgcttagtttaaaatggccaggaagggtttagaaattctgaataaaaatcttccatttatgttttctagagggaaaaaaatggaaaaggcatttaggactattctgaccatggaatattacgtagacatactagagtagaggaagatgccttgcaaatatcaggcaaaagcttttagactcactgtgtacacagtggctacagtgttcctggtctgttgaggggtcatatgtgcttcagtgccactgtggaggtggaatagaagaaatcaatcacccgtcacaccagggactgcctagaaagcctgcagataaaaagaaaagagcaagccgagaggagagcatactgctgataacaggatgggcgctcttaaagtttagatgggttttatcggaaaagaaatgctactttatttattgctcccaaataaatgaaataaatggcagagctcataaagggtggcacaaagtcttgtttgtggtcctcataggagatgcaagcatcagaatagtttccaaatagaaattatctatcagtcttcatctatggaatttgaagatagtttccaaatagaaattatctatcagtcttcatctatggaatttgaaggttgtatattagtcatatccaagtgagaaacttacatgagcttgcctactacagcttgggtctgtcagtggcgtcattaagcccctcccccataccctattcaaaatcacagtgatctcaaggttgcaaaaggtctggagccaacacttcattagaaacaactgtaaataatgctatatattgtttgtatcacatctgcaatttgccattatgtggtaaagaaagccggtgccttacttctagatactgatgcaaaacactgccagctcaggtccttttcaattcgactttaattcttccacacatgggattttactagaccccaggtgaggacagttaaaattccccattttcaaaagcaaccacatggctaacccaaactggctcaacagattttattgctgttttaatttccttgcccctcatggatacaagcactgccttgcatttaccttcctcaactatgaagaggataatctggttttgatgaaatcctatcttgaatataaatactgttttatgtttgtttcctggttgaatctctgccagcagttttggggcatgctgagtaggtatcagctatctcatgcatatttgaggagactcagcactttcacccctattccagagtatgtactgcagcagtagaatgtatgttggcatctgtggcagatcagcatctttcaaacataacacaaactgcagacggcctgtggtgtgcatttttcataacacaggtgttaatttctcccccaggatatataagaatggtaaatcaacagatattaactctcatgagttatgttcaagtgctcatcttaaatagtctatttagaatgccacatggttggcaaaatatttgacagtctgctcaataaattttggtctgtcatggacggtttagaatcaaccctggcacctgagcattggcccacattggtaactgcatgagtaggatgcatcagtaaatatacgtacatcagtagactgactgggaagaaagaaaacagatgctgggataaatgcaccggaacagtacaaaaatcaagtgtggacattgtttattttgtttgtttgtttgtttgtttaagtaatgccattagtcaggtatatagtggttcataaaagtatatttaaattatttacaagagctagcatttaaaaatacataaaactaagcctaagcctggtacctcgagtctgtaattctagctattgcgaggctgaattaggtaggaaatttacaagtctaaaacctggtagggctaaagaacatactatatacatatacatatacatatacatatacatatacatatacatatacatatacatatacatatacatgtgtgtgtttgacatatacaaacatatataattataaacatattcaatatacttacattatatttatataaccttattcatatatacaaagtgcagtcacactatcacaatggacagtgcctccctaaacaacatagtgtattaaatcaaaagcccatgacagatatgggttctgagttgctggtcagtggtttttcataaacacttccaatatcatttcaattgcagttgttcctggttgctctctagaacttgataataagatgctgtttaaaatactccatatgacaagacatggaaaaaccatgctggtaccaatctaaaagcttcgtctttactctctggctttcatagaactaaaaagatctatgcatactactagggtagaaaaataacgaatagtcttaccaaaatgtgaaccctgagagctaatataatgactgatttagcaagatgagttaattcttgcatttagcagtatgaatattttggaactagccaaacattttttggggagggttggattaaaaccccttccacagaacccatgattatatcataaaatgggtaatgaatcatgaccagctaggtcataagtcttagaggagagattaatactattattctgttaaatggacatattaataaactatcctccaagttcttattttacacccatacattaatgtatctccccaccttcatccaaaaagtgctttttatagtaggtgggattaataatgtggaatgatcagtttaaatgagacatctattaaaacaagcaagcagccaaacaaaataccaccaaaaccaaaaaaataaaataaaataaattttaaaaattaaaaaaaaaaagccaacacacctcaaggcttagggataattatggaaggggattgtaaaattgcaagagctactggtagtgtactggctagttttgtgtcaacttgacacagctggagttatcacagagaaaggagcttcagttgaagaaatgcctccatgagatacaactgtaaggcattttctcaattagtgatcaaaggggaaaggccccttgtgggtgggaccatctctgggctggtagtcttggttctataagagagcaggctgagcaagccaggggaggcaagccagtgaagaacatccctccatggcctctgcatcagctcctgcttcctgacctgtttgagttccagtcctgacatcctttggtgatcaacagcaatgtggaaagtgtgagctgaataaaccctttcctccccaacttacttcttggtcatgatgtttgtccaagaatagaaaccctgactaagacaggtagtaaatatgtgaacagaaaaattatttgtcaaacatgacagagctgccaaacacataaactccagtggttctggttgtgactgcaatgacacgccctgtataatatcaaaccaactaggactgtaccatgaaggcaggaggtgggcacaaagtccttccctagtggaggaacaattggcaatttctggattctggggcagagggataagataagttttcgtggggtatggtccctgaaagggaattcactctcttgtagatactgcatatgctcactactacagagaagcaatactgagcaggctcaatcctcaattggcttttatcaatattattattattattacctttatgtttatagtctaatagttaccccccccctcccagtcagccctcccacagttccttatcacattcctcctcccccttgtctccaagaggatatccccaacctacccttaacctcctgtcaggcctctctctggggcctcaagtctctcctgggctaggcacctcttatcccactgaggccagaccaagcagtcctctgctgtatatgtgttgggggccttggaccagctcctgtatgttgccaagatggtggctcagtgtctgagagatctcaagggtctaggttaattgagactgcaggtcttcctgtgggatctccttcctcctcagcttcttccagcctttccctaattcaaccacaggggtccccaacttcagttcaatggttgggtgtaagtatctgcttctgtctcagtcaccttcttgttggccctctctgagggcagccatgctaggttcctgtctgcaagcacatcatagcatcagtaatagtgttaggccttggagcatctccttgagatgaatgctaaggtgagcagatcactggactgactttgcctcagtctcttctccatttttgtccctgcagttcttttagacaggaccaattctgagtcagagtttttaactgtgggatgacaaccccatttctctacttgatggcttgtctttctactggagtattcaagttccctctccccactgttagcatttcatctaaggcccctccctttgagtcttgagattctcacattctggtattttttagagggttccccttcctcccacccactgaggttgcatattccaattcattctgctggccctcagggattccttcctgcccctccccccaaaatctgattatgttcctcttttcccttccccctctagtctcccacccaggtccctccctctgtctgctcccagtgattgctttcttctccctcccaagtgagattgaggcatcctcacttgagcctttctgtttattaatcttcttgagttctgtggattataacctatttattctgtacttttttgaccaatataaaattattagtgagtaaatatcatgcatgtgtgagttccccattcaagatgatattttcttgtcccatccatttgcctgcaaaactgagaatgtcctcattcttaatagctgagtagtattccattgtgtaaaagaaccatattttccaaatccagtcttctgttgtaggatatctggcttgtttcaagcagctgtccatcacaaataagggcactatgaacatagtggagcatgtgcccctgtgagatagtggagcatcttttgggtatatgctcaaattttctgaggagcctccagattgatttccaaagtggttgtagcagtttgcaatcccaccagccatgtaggagtgttcctcattctccacatcctcaccaacatgtgctgtcacctgaacttttgattgagtaattctgattgttgtaaggtggagtctcaaggtcgttttgattttcatttccccgatcactaaggactttgaacatttctttaggtgcttctcagacattcaagatttctcagttgtgatttctctgtttagctgtgtaccccattttttgattgggttgtttggttttttggaggttagcttcttgagttcatatattttgggcatatcagatgtggatttttaaaatgcagaggacacatgaacttgaagggaaaagttgagttgatgcagatagaggaagaattgagtggggaggaatggtaatgaacacattttagcaaagcacattatataaatgtatgatgtctcaatcaccagaaaaaatatacaaccaaagagattttattactgtcatctttcatgaaaatagctctttttagattataagagctactgcattttacttaagctggaattacattcgaatgcataatatgtattttatatgttcatgaaaattctgcttcagttactctcatagaattttaactaaagttcatgaaaatttcttcattttaaaaagaaatataaaatttggatataaagatgttgattaaattacaagtaacattaaagttcaagttagttaaatcaaaaagactggtcacaaaattgaattgtatagagtgcttgcattcatgcatgaggcccttagtaccataaagaagtacatgaagacatcatttcttttaaactacattttttactatttatgaaatatatttctttaagcagaggtagtatgtctctttggcatttaaactaattattgaactttagtattatttctaagaatagtagtttaaatatttaactataagttgtgtagttttgatgaaaaattttaaacttaacagttgttagttttagacacgagacaagaagttggctattgtcttcatgcacaaatctcaatactaggattctaacgggcaatgacattactgtttgtctttatgacactgaaataatgtttgattatatttaagttttgccatttttgtttatgacagtataaaacaattttcagtgcttcttatccttttaatctaatggcccagaagttattacaactgttcttatgagtacgtattaagcaaataacaattgctagttgacataaaccagataccattaatggatcaagtggctcacctgattaaataatttccaattgctcagtctgtaatctttgctaaaacggatggctatctatataatgtaggggagtataatataaaacaggtggccttcaaccatgtgagggcatcgtgctaatgaagttcatagatactgtggctttataacagtagataagccaatcaattggtaatgtaattctcctcccttctggccactcatgacttttgtagcaacatccaatttcttctgtaagatactgttgttttaactactatcatggtttttctcttgcttaactaccttccatgaggttaaaaatgatggtaaattgcaaattgcaattaaatacaatatcaataagatagtatactagctataaaataacctacagcataatatttgatttagtgctgactttagccagttaaagaaaatgatgctcctataattttttcagagaacctgtgagtagtcatcctgtctgttggtgagatttagtatttacaatgtcaaaatgagctctttgccatgactttctgtcatgcttatcccgcactgagttaaacaatacagattagtgagtattgtgtaataaaaatgggcagatccctggtgtgcttcatttctgattatgtacaagtgctctattctttggtgggtaactcatccttctccagattgctccttcttccttgtgattatgggaccttaatatcttcctcctaacccatttttaattctttaagaatatggttcacaaaggctctgaacaattaccttcattccgtggggagcacctaccattttattccattcagactccctttggctgaatgttagagaatgtctgggctaacctttgtaaagcgtacatttcttatgccctccatggaaataagacatctaccttccttctaataatgcagcttctcgggacattacccaaggatggcagatctaaatgtaggcaaagtgtgtggaaaaaaattatttctttggtgtggagtagaggaagccttgagggaacgagtaaagagtgcttaagtcttaggacttaatgtcagagtcccaggcctgagaataacaaatccaccttagcatgagcctgccagagttcttttaacatcacatttgttccttgacgtgaatctggatatactaaaatttacacgtcaataatatattttttatttttctaaataaattcacatttagtagttataaggatcatgaaaatataacaaattaatgtttctctttggatgttaccggacactggaatcacagaaaagtttagcaaagtgatgctgatattaaaaccatgtactgcatcatctttagaagagaccaactcaaaggaaataatactatgtaacccatctaatactcatctccttaaaaagaacgaaaatgcgaacctgacatgctggagtgagccttttctacaagcgtatggactaatgaggacctggaactcaagacaaagagaagctgccaagggaatcacagagacaagattcttgccaccaccatctgcttactgtctggggattttcataggagccaatgtaaaaataaacagtgaggcactgtttagacagtggactgtgttgaagggaacaataccagttccttaagtctgagacactttggggaataaagtcaaaccagaaggaaacttagtgggttgcagagaactgtccatgtatcataaaggcaagatattgctattctgtgtcctgctgtggaataattaattgtgcactatgggagacaccacacacacactcgggtctctgcttcataggtttgttgcttaaactttgtaaatagtcttggacaggacagtgttggaaggagtagttgaatgtgttgtccaagatgcacaataaaaacttaagacaaatgaactgtgatgatttcaacattgatccctattttctaggacatgtctggcacttgctacaccagagtttctattaattttctggtcaatgtaagcttgtagtttataattaataatgtctatgtctcactatcctgtctgtattttttaaaaaatataataggttaactgattttacatttggaagagatttacacaactaaatttttaatagtatatttttatttatgcaagataaacaaaacaagtggggcttactaacatcagcacaaaaggtgaatggcaacaaaatattggcatcagagacttacaaggaattgttctgtgatgagtcttttggattagggagtacagcagagaccacatagggaacaaaagctgaacgcagttagtgatgggctaggtggcattttgccttcattgcatcacttgttcaatagatgaatcaacttatagtcatgtgaaagtacatagttgtgagtgcagaatggaattgttattacatgcatctgtggtgggaagctgatgttctgacatactccagtctagtgcatttactgttgcgcaggagtatgtgcatcctttactgccttcacccttagcttcaaggcagaggagagtttactggtgtagtagagatggaattcataaatgaaacccaggctcttcatgcagtgcttgcttctacttcttccctgtcttaatctcatacattcagaactctgttgcctaagaaatagcaacactaatagcccattcacaaaagagctccacggccctgattctcatacagaagtttgaaggtaagcacaggcacaagctgagcttccctcaatgcttcccccaccccactcactctgctagcctctccttgtacacacacccactcacacgtatttttggaggcagaggagtactgcttgcttctgtgcaaattaagttgcagaagaaaataaatgttgacgtgaaactgaaatacactcaccaggctgggaagagcttctggagaaagcgtcctctggatgccattctggggttcccagctcccttcaactcagcaaactctagaagacaatgagccggatttgaaagcaaaattagaggcttagaagccatgggcatcaaaagattgtttgcttgtggtgcagggagatggagaaaaataagcaggtctctagttcattattgccagtctttttggttttatatatatatggagatgttttggatcttagggacctcctagacacagaagataatctaaaaatacacttgtttcaatttttaaaaagccacacatgtttaaaaatcttcctgggaggtaatctgttagatgaggctgtgataatttggcttccagcagtaacaacgtatgccaaaaatgaatcatgaagtctagacaaacgccactgttttcttccagaggcggccagcagatgctttgtgtttcttgcactctctaactggctagattaattttgtaccatgcttttactctgcaatggccttggaaccaaaatatatatataattttaaatgtgtctttcggccatttagattccctcagatcacttgctgtaacgttcttcaatattaacaaagagtaaactgccttgtgaaaagcctatctgatcatccacgatgtaccacacagctctgcttaggcagggagatcacaggcagtgtaataaggaccccagagatgttctgcaattgtcacaattccttaatgcatgaggtataagaaggacaaggcaaaggaaatgcaagcctgggggaacagagatctcaagtttgtccatgggctgtcaatcaagtacataattacaattctggtaacctcattttccacttccatgatattcataatgtaagaaaactgtgaaaccgtgaaacctttcagatcaagaacactcttcaaaatacttgttatatttggacaaattcctttgcaaattttccaaatgaaatagtcacagaatcctacaaatcaggacctttttcttttcgagggaaccaatgcacagaaggtcagtagagcctgtccttggaagatagcttaaattgacagtctgcacaatccaaatgcaagtgttagctgcaataattgtgggaaacatgattgagctttctactcattacaagcaattctcctaagcttcatagacagactttccttaattgaggaacaggcattaccaatgaatttttatgagttcattcattctagaacatttcatcatagtgcagtcagattattatattaaaaatgtatatcacaactgaagcagttttgtaaaacatgagctaatacactattgtaactatttatttttaccttagagatgtagacaagaaagcaaactgcttacagcttgaaaaatcataaccaccaatagctaatgattgagatgttgcaactcagagacagacctctctttgaccacacgaaagtaattactattggttatgaagaaatgaaaaggtcacttaaggttcaactaagacgtagcatacatggataacaatttagctgttgactgataataaaagctaagtttaagtccaccagagcaggtgcctgccctctgtgacttagcccttgcttgaactatgagatattagtctctgctagcattcctatttgctgttttaaaaataaaatagataccaaaaatactacaaaatgaaatcacccaagatattttaatgataggagatgagctccagaggcaggagtctgaagtagggtcacatcatagtctccttataatctcataaattttagtgatgattttaatatattacttaagataaacacaaaacccacttatgatgtcttaaaattaccattgaaatattcatgttttctcgtagttatagcctatcttattgtagccatagctttctctttgagtttaccatgtgtaaacattcccaatgcagcctcccaaggagccaacattgcttagatctcaagaacctataaacaagagaagtataatcatggccatcaccatgattgactacggatatgactacgggtccctgatgcagagttcagctaggtgttttaagtatagtttgttgaaggacttttgttctctttataaatttaaaagtattgttagataatatgcaatttaaaaataatttacacacacatacacatacgtgcatgcacacacacacacacacacacacacaaatgcaggctattgctaggagcctctgtaaagtttacgaattcagaaacaaggcatccaccactcccccctcccccagtgaatcagaatttcagcattctacagtgactaatgtaatgagtgaggagacacttcacagaagagtttgagagttgggctttagagaaaatgctgtcattagactccaaataccaacataactatcatttggatcaagagaatcaatgaggaatattaattaaaatattttaagtcagtaagtggttctattcctcttagtctcctccccctccacacccacgcaatgcaacatacacagtacacatacacattcacacacaaacgcacacacataatgtacacacatatatgcacacacacatgcgcgcgcgcacacacacacacacacacacaatcagaagacctccttaagaacaaacctagagttcccattggttattttctaccatattcttactggggaacaggctctttttctcctacctaaaaagcttaaattttctcatggttttcattgtcgtggcatctgaaatgatgatggagtgtcagttactcactcttgtgcgctatttacattttgtgaagactgtcaattcttcttcgtctatatcttttgaggtaatagtaaatacagatgtgtacatgattaattctccacttgctcacatttggatataggctatgttgctaactgaatcttataagcagtttgtagaggagacagaaagatgacagaggagagagaaagaagagcagtaattagagacaaaatgcagagagagtggaaatagaagagacagagatagtcagaggagcatatccagcatcttttttatacatggttattatttttattaatttttctcatgtattacatctgaaccacagttccccctccctcccttcagcctctactcccctcccatttctttcccccaaatctacttttcctcttattataaggtaggtatcccagggatatcaaccagtaagacttagcacctttcatattaaggtagggtgaggcaatccagtgggagaataaagattctcaaagctgttaagggcatcagaaacaggcctctgttcactcttattttaagagtctcacaagaacaaggagctacaaaactatagcatatatagaaagggcctaggttagacccatgtgggttcccttattgttagttccatgtcagtgagccctatatatgtccaggtttgttgattctgtgagttttcttgtggtgtccttgacccgactagctcctacatcttatacattgctgtaagagtacagaaaattgatccagattaaaggagtaaaaataaaataaggtaaataaataaataaataaataaatcattgcactcagctcaggaatgatgtgatctcaactctgaaatggtcaaatggagaaatggtgggaaagaagaaagagtgaggtgggatagagaaaagagaggaataacagaatgggaagagaaaagaagagagagacggagattaaggcatgtccaccattttttacactgttgtgaatggctttcaagtaaaaggtaaggtatgcaggattgttcacaagtagaattttttctcagccatcagccatggagagagagaaaagagaaagggggagaggaaaaagagaggaaagatagttcttccttccttgttcttcatcagggcatgaatttctagaaataccagagtagcaaggtataaataattcttatattgtccactattctgatttctatggataaacacttaattaccttaataagtcctaaagacatagatgacaactgagatgcaaagaagtaaaccaaggtttcacctggtgattgaatatgagaaatggtttctggaatctgtgaccttacacatattctgttctcctcaggcagaaatttacgtgtttgctcagttttacagaagaaatatccgtgaatgttttggagaatgagtgctttctcatttttattatatggtagacatagcgtattttaaaatgtatcatctcacacacatgcatacacacatacatacacatgtacaaacatacatatacacacacagatacacactcatacatacacaccatatacatacacacatatacacatacaagcgcacacacacacacacaaatacactagtttaatatttttgtggtttatctaccacataaagaacagaacaaaagttaaacaatttagtaaaactactgttggaaaagtaggaatcaaataagagtcatgcatggcttttatttcttcttactattattaggagaaaaaaactagagtaaacaaagaatgaagtaggaataggagacaaaaagccatttttttaatatttaaaactgtttacagaatcagagtaccctgcttatctaatgttgaaagcaccacctttaaaatatttgaaaatttgatttttcatacaactatttcctataattgatttccatacattttaaatggagcaaagaaaggtaaataaattaccaagggatatttaatgagtaacgtgtgaaatggagaggtctgtgggggcgatgacaatttggatgacacggtggtgagccataatgaaagctctcctctgatggacttacatagaactttttatgtagcagaaattatatttttaataatgcccctagatttatgattttgtaagtgtgatcatagcaactgagattttaaaataacctaataatagttacactattttttaaatcacgattgattgtgtaaactcatagctaataaatacctttaaaataactgggagcagaaggttacagagtataaaatcaagcaaaataaatagctgtgtgtataatatttattctaaattaaaaatagcggcaaatgagatagtaagaagagactataggtcttatatctttcagcaaaagtgcttgataaatgcagagaatgctacagcaaggtgtttcctcaactcagaaattaacaaaaaatgtgcggttgccatggggatatttaagttacagaaaaaaataaatcaggaaatgatgaatgtaattaatttttcttgaagttcaactgatgcaaggtaaaagcgtatttattatgtgagtgtctagtgatccatgatattaaaaaaaggagcaccaaatttgcaatatatgtaaattaggcaaattttgttattgatgttgacaacaaatacaaaagtgagttactcactggtgaatttaatttgctcaaatgattctcacaaataaataaataaatgcacatacattggcaaaaatagaagtctgacttttgtagcttttactttcaatggacaaagattgtatcaggggctacaatggcccgccacactcagaagtgagctagcatgtaaacttcctgtagttctcagcaccagttcataagattggggtggtctgagcagctttcaatgtctagctttgctacggattctaaatcagagaattaaaagctcacaattttatttggggaatcaatccagcagataagtaagaagacatatttcaagtcccgaatgcgtttgtatacacaagaacttctgacctttcacaagaagctttacatctaaactttatagaaatcccctaagttttaaatgttgagacttaatgcaaaacatgtaagtcaagtagtagaagacagataatatgggtttgcagtttctatgtgtctttgcataacttctccctaataaacacaccgtggcatgatcccttggagattttttggggtggaaattgttggttactacattgcctgtgtcatacgtttgtaagcatgaagcggttcactgtgttgtatcagtggtgacttttactaaatgataaaccattcagcctacaggtctgcccttcatgagctggtaaatctcagaatcaatctttgtgtttttaccatggattcaaaaaaataattgattttgattcactgtacaagcttatgtagtttccagtaagaggcacaactttatccacagtaacagaatcatcagacaaatttttaatgagaataacagaaatttgtatatctgtacattttatgctataaattcatgtgtacacatccatttgtatgatcagaataggaaaagatttgtgatatcgtcatggtatgttatatagctgatcttcaacaggcagtccatttgaactcagagagtgaattcatgaaatggtcactttttgttgtatcaatttttttatgctataacagagtacctgagaaaagactactaaaaagtgatgtttttattttcttgtgggccatgaatttcagtccattattgttggtggaggatgtcagagcagagaagcttttattaggcattcaagaaagacagagagagattgcctgtgtcagctgctttaccacctcccccaacttttatccgaatgttgtgggttccgagcaaatatatattgtatagcaatatcaatcacagacacatacacagagagagagaaagtgagagagacagagacagagacagaaagagacagacacacagaaacacagacacacagagaaagaatgaagtagagagaatgttgatttgtcaaaacatatgggatcttcttacctcataacatcatgttttttcttaatgaaacattttagtaagttagtttttgttgtactaaagtgctttctacatctaccctagctttacctctatagaactgctttataaatatcaagaaatgttcccactcatggcatccctttatatattaccagccattgcctaccatttccttctcatgaccaaacacacttgcccctcatcattatactcggctttgtttcttgttttgttgtcttatttgtttgccatttttagttagaacattttgaccacttgccaataaatgtaactcattttgtcagtttctgtcggtcaatgaggaataaagagctgaggcatatcttctgtaggctcttagcagcccagaaaaggtgggaagactatctcctttgttgcagttgccacattcttgtgatcagccttccacacaagcagccaaatcatgtgtttggctcacagtgaggttcaacatgaaaatattagtgattgccttctatctgcctggactgagatagtacatccacacattgttaacctcaggaaagtttgtggttgattaatagttcaaagacttcatctcaaatatactgtcaagaaaatatcttctactcttaattggtatcttgacacaaacagacacttttacttactccagttaaattgcaatacgttgacattgtatcacccttaccctagttaaatgtctctatgttagttctgcctcatcatgtttgtaccaggatcattttaaactctgtgttttgtgtcttagatcgtcctcagtttttccagctgtgcatcaaagacatagttgataaggataccatttagttttcagctaagacattactaaaagtttgataagttgggtggaatacaaaccaaagttggaagctatctcctaggacccttttctactggttcagaaacagaacccattcctcagcagcaacagccatgtgagtactccgtcattaacctccctcacagctacggggatagcatgaggtttcttcaagtgtcttatttagaaaacggtgagctacatgatgtttgcaaggtagcttggcatcctttaaaatcaaagcacttcggtatttttatttatgtactgagatgcttagttagcatgttcatctattacaatagactttaaccttgtgacaagacttcaggaactcttgcagggtttaataactgatgcatccatgtcgggttccatattttgattggtatccattttcaattgtactgttggcttttccctaatcttatgaaatggtttctactcacttcatttcctagtgattcatttaattcaccttaaacttgtaagtcatctgtgtcttgattagaatatttatttacagattctaagagtctataatccttgcctttatttctattacctcttgatcatgatatctctcataatatggtgatagttctcccagtggagagacataggcacaagctattatcttatacattgaattgtataccgcttttcataagcagtgattagatacatcattttgaagatcctttttactttgtatttactagtcttatctttcatatatatatacatattaaaactttttaatatgtatatacatattaaaaattctctctaaattaaaatttagtccttagtgaagataaaaactatatttccattctcaaaccttttctttaagactgttgctactcttctgtatatacccttgactgtatgttttttccttcatattttgtagattgttcaataaaatcagagcccatcagaaggagagccctaagaaccaaaccggtttccttgtatatggattctttgttggcttcatcagtattatttctaattatattatcagattttccatttttacacccaacctcctttttattttattgttcatgatatcttgggaatagtgatagctgtcttttaagttgtttttgtaatgaagtgtctatataacgttctaaaatccaatgtatacttttgtagcctttccatggctcctaaatggcaggtttttttttttccctctagacgtttctattgttttacctacatgtataagtttctctttgttagtaaagattacctcagaagcagaaacctatgtcattgttctgtgttcatcctgagaaatttgtttcaagagaacacaaaaatctcagatgttctcccttagggataagaaagcccaagtggctagaatttcccatcattgcctttttctcgtgggagttttataatgtactgttagcattacacatgcacttattacaagtgtgaactcaaaacttcaaaccagggttatgtgatcaaaactcttagccatctgtatttgcagacatctttgaggcagttctgccctctccagtgtaagatctgctattaggaagcatcatctatccctgcaggttgagatgtagcacagcgcatcatcctgatcctgcagccacttacactcattcaggtagtttctactaagggtaactctgtgcacatgctcattgcataggggaaaaataccttttcaattgttttaggcattttctagagtcttccatatagcatagttattttgtaacatgtatcgtgttaaatgtaagacaatttctaatgttaaattgtaaactttgcttaggatttagaaataggttgggcaccaggttcagtgaacagccatgcacatgtctgaggccttttgtggccaacacattcaagatgatttcctactgagaactgcataaaagtctctacttttgttcttatagattatccctaccttgaacccattcgtcaactaggctgcttttactcacatcaagatttctgtaaatctgcctaatacagccctaaggatgtcatttcctggttggaacatcttctttgttaaatcttccgtgaagttgagaacctctataatagcccttcaaacatttttgttggacttctatttcataacccacagcttcttatcacattccccaaatccacagggtgagctggggcttcgctttttgtactcaggcctctatccatgccctttgtccctctaagctctctgtttaccactacttggacattaaaagtctctcagctcacattcctgaacccccaggagatttgtttcttgtgtaagtttgctgagtgtcatcccctctgccccagctaagtatcaatagcaaacattgaaattcaagagtctggctgtgagctagtttgtacagtctatgaaagtgaaccagatcctcaagaaaggatctcacacctgcatcttccttaacaatacttgttgaactgcagcctgtgttattctgtaatctgtacgtaaattcctctaaggctttctcagatggcatcactcattgtaatgtgcctaggaaaaggcttcacttagaaatacttactgatttagtacaaaaaggagttatcttattaagaacaatactcttgaggagtccaaagttagtagttcattctagaattattttttctaaataataagtagaaaatggtaatctatgaaatgttatgaagatttacatatgtgagtggtgggaggggaaggaagggaagaagagggaaataaaaagcaggaaaaataaaggcaccaccaagaataatgaactacagaggctttggtcatttccatctccaggctctcctccttctgtcaagaattcctgcccacatttgaagggaaattacacatgcacgtataatcccctagtaatgtaggagatattgtcttattccatacttagagaaaggtgagtgccagcttaaatttaaaatatacaaaataaaggccattatgcatttggacatcacaatgcagagttgagaggttttatggaagataaaaggctacagatgagagagcagcctctgaaaatagggaaaaaagctcagcaattaaccttaagatgaagtagctttcctttctcaccatgatcaactcatacttaagtctttaaatggaaaatgacttgtagttaacctttatgattcagaaaaccatttaattgtaattatagctaatccaattaaagatggattataataactgctgaattaataggtcatgaaacactgagtttaattatgagtgtatttattttggaaaaattactcttaaggtattatgtaattttaaaaattattttgagctcaaaattatataggttgtgattcataagtaaaagaagaagaaggagtgaataccccagagctcttcaaggcataagggcagaacaggaaacaggacaatatgagtgacaaagcttgattttaaataactaaactcaatttttttaaattcacaaccttgaaaaaatactattagtagtttagtttcatccctagaaacatcaaaattattgttaaactttatattctaatgagattagtagaattaaaagaaaattttacttttaaaaccacaaatcgtcacatcgcacactgtaactctgaaactcagacacttgggtctttagttgcatatttagagggaaatgtaactgtgtttaaagtagaacaaatgaccagtgttaacatcaatagatatattttaacattagtgttttgttctttttctacatttaaaagttatggaaacagacatgagtagatataaaacaaaacaaaacaaaaccacaatggcttgaacaagaaaataattacccacagcaattgaagcacatattaggggatgcatacagtagggtttcagtctttccaacacttctcaccaatatgcaaaagggcgtactcttccatgatgtgcacattcaagccatgttctccaattgggttttggggtgatattagtaaattctcactgtaaatatcaatttccctaattctacactgcacagttttcattcttaatattaataaaatgtaagcaaacagacaaggttttcaaactatcatctgacggcatggggaatttcccataggtggaaagaaataacgttttcaaatgttttcttctaatacatgctttgtccttgaaccatgtacatcatgaccaaaagcatttctcttgctgcttcttgactatgttttcagctggttataaaaagtgtcaaggtttctttacatattctcttatgaattatccagtggcttatacttttaagataacattccacgcaggtgagatggttactgccaggcctgacaacccgggtttcatcccagaggctcacccagtggaagcagagagcggattcacaggttgttctttgactccagtgtgcatctagctatgcacacacacatgcacacacacggagatacacacagagaaagacagagacagacagacagacaaagagaatgagaaaaccagcaaaaccacaacaacaaaacaactagtactctccaaatgaggcgcatgaaaagttttcatagaaaaattaatacaaatctagaatattacaactggagaactttgaaggagacagcaaaatggtacacggtggaccacataaggtatccatagaaactggctcaaaaagctacaagctgtgatggagatgcctcagcctgggccaggttatggtcatgcttaccactcagacacttgatactcagcaaggtcctgagggaacttgtgcctacggatagatacactgtggtaactacccttgtgtgccacagactggagccatccactctctcctgtgtggatctccagatgcacggctgcttcgcttgaaatcaaactgcattcttcctgagcaacaacctcctctgaagccttgtcccttagcgtttggaagctgctgagctgcacataatcaagccttcctcggagttgtttaaaacaggcgcattatcagagtctcatctctctgaaagcttcagacttcattacactattagaaaaaaattaacatattgtacctgataagcctctacacagccgaaatcctcgcatccacactaatgctgactatgccagcacttctttctgattaaaagtaagttactcaaagttaaaatatgtgctctttttctacttccttcttgagattaaaaaatcaaccatgaagttgttctgacgataattttctttcagtaaactcaagcaatcattgtagcatgacattttgattctgattttgaagggatttgtgaaagaaaatcaagaggcatgcttatcatgggtaacaaggacgggaaactggaaggaatacagtgatcccgggctagtggcttagtagaacattttaaataggctgctctaatgctgttttatatcatctgttagtgcctaaataccattaaggttgagggatttgtcaaaaataaacgtatatagacatttgagcgagaatagcatttttacatttttgaaagcaggttttatctataattacgaataactatgtatgcatttgtggcagagccaatttactgatacctaattttaatcatcaaaaaatttaaactaacttaaaagactggaacttctgtgatctgaaaccaagagttgcaatggtcttccaagagtagactattagtcaccactattttacaaagcaaggtcctgcaactttatgttaagaaatgatgtgaacagcacaggactattgatttcaaaactttaaattaatacggttgcacatatcacattaaaaataaattctagacaagaagactgtaaagcagaagtagcactgggtagaaaacaacctagtaatttgaaggattgcttgtaagctcagagtcactggttggagagagatgcccataaaaaagcaatgtgcttgttgaaaatgctcatgatttattcaactgctatggttagagcttaaagggggactagatctttcaatgactgtaaagtaaaattgcacaattttattgttggttaatattttactttagacacagtcaactctgttcttaccatgccttaccacagtgttccaacaattgcccccagattgaattgtgccacgtgagcaagactaaattagaacaacttctaatacagtttgcacctagactaactgcactgatgatttctttattgtttcccaagtgtaatcattttactattttagagttagaaaagccaagcttctgatagaagatagaaaaaaagcagccctgccagatgtaaagaactcccctatgactacgacgaaaggtgcagcttagggttagatgcctcatcatgatatttgatgatcccactttaattcactgtattatcacgtgatattcagctttctacaaactctataaaattttagtttatttatcaagaatacaggtaaattttttatttgttgatagagaattggaaatagaggcagtccagatgctgtcaggagaaaagagccttagagactcctttgttagaattctggtagggggacagaccacttacttagcactagtgaactcacacatgtgtgtactacagctatccaaaagagaggcttgtaattttcatggtagctccaagttactcagcaaaacagcaatgttccaaatgccttgtatgtgatgagctgcactggaaacaatcgagggaattgcctgaggagaacagagagagcatactcagtacagttagatcatgtgttctttgttgctaataaatacaaataggtttttagggaccaaagagacagttcaatgggcaagagtacttgctgttcaaggaaaaggatgtgagttctggtccccagctctcataaaatcccatgtacctgtaaccacagtgttggcataaggagaaggtcagaggcaagagaatccctggggatgcaggctcccatcctgttcccaggttcagtgagaatgtctgtctcaagagcaaaagatggacagtgacagaacaggacacatgattgtcctctggcttccccatgcatatagaaaggaataaacatatacttgtgcatacatgtgtataaccacacatccatacctgtacatataatagtttcagaatcaaactgttgtaggttatacaaagttgaatatagttgtgatgtctccctaagactcagtttccccaacatgagtctgtcaaggtgggggggacatgaatgttgagcattaaacttcaagcagtttaataagtattagccattactccttctttctgggtataaacatgtatttctccctgtattctaaatctaatttcagtggggaacctagagtaaatctcgtatgacaagaaatgtgaagaatccaccctacacctggagctggggaacgccagatcccagttgtctcattttattatttcttgaaacataccacaaaataatctgcacaaaatatgtccatgtatttgagacaactgaataatttacaggattgtctcttttccaaactgtcatcatgtacacttggcaaatggattcacaattgagaataattttatagaaaagagatggtaaattattcacattgtcctttttccccatcagcacattaattaacacagcatattaaggacttgtttcatgtataatataatacacaatgaacgaagattaaaatgtcgtagaaaattcaaaacagatgcattcctttaacagctggatgacacatagctcaccttttatttaagcagagagtactacatttttacattatttcttgaacttctaaataactaggggagtttttaagtttcattgagaattaattgtcgttattggtatatattcaaatttttaaaattaaacatactgttcctaatatttttgtttttattctgccatatcttaatggaaatgaagttagcctcactttaagaatgttttggctggatattttattctctattctggggaggaatgaagtatccacaggttggtcttccttcttgattttcttgtgttttggaagttgtatcttgggtgttctaggtttctgggctaatatccacctatcagtgagtgcatatcaagtgacttcttttgtgattgggttacctcactcaggatgatatcctcctgatacatccatttgcccaagaatatttcattcctccctagaatacttcccaagagtactcccaagaatacttcgttcctccctagaatagggaataaaatatccatggaaggaattacagagacaaagtttggagctaagacgaaaggatggaccatccagagattgcctcacccggggatccatcccataatcatccacgaaatgcagacactattgcatatgccagcaagattttgctgaaaggaccctgatatagctgtctcctgtgaggctttgccagtgcctgacaaatacagaagtggatgctcacagtcatctataggatggaacacaggacccccaatgtaggagctaaagtacccaaggagctaaaggggtctgcaaccctataggtggaacaacaatatgaactaatcagtacccccagaactcatgtctctagctgcatatgtagcagaagatggcctagttgaccatcattgggaagagaagccccttggtctagcaaactttatatgccccagtacaggggaaatccagggccaaaaagtaggagtgagtgggtaggggaacagggtgggggaaagggtataggggacttttgagatagcatttgaaatgtaaatgaagaaaatatctaatttctaaaaaggcgaaaaaaaaaaaaaaagaatgttttggctgctgtgaggtagtggcacaaacctcagcatttgggaggaagaagcagcagagctctgagtttgaggccagcctggtctgcagagtggcagcgagggttacacagagaaaccatgtcttagaaaatgttttggtgacttttacacaaacatatttattattaaataaaaattaatcctgcaatataggtacatggaaataatcaatatatttggttataaaacaaatagatttctatcgcagtgatgtataaactaattggctggtatctacaagagttgagctacatgattttaaatcagtttgtgtagctccatatactattttaaaaatattttcttgttacacttgtttgcatagccttcctctgcaatttgtcgtttaagatttgattttttgtttaagatcatttgctcttggtcctaagcttaggaggaagatattaacatggggggggggcatagtaatttgtgttcctaatcttattctggatttgtaaacaaggatgagcccccgtttcctgaacccttcctttgggtttttattaaacaactgacaccaaagtcaacttttacagatctttctaacgacatcatttggtactaaacatgccaatgatagttgtccagttgtgttcagtattttaacttggatcaataaaatttgaaatttgtaaagtactttcagaaacaagtaatgattttcaaggtgttgtgagacgagaagtgaacaggggatgggttaggccaactcagctgctgctgattgtccctgccaggtctgccgagtcattttgtaaaagaaaaggtgttgataaaaccatataactcttgggagggggaaaagaaagaaagaacatgtcaacgaaaaggatggatgtttggagagaaatatctgtgaaaaggtctggagaaagggatattgatactgaggaagggcgagaagggggtgaacagtttatgctctaagctctgagatatggagacaccatctaatacatgcagacacacaagtcctgagtcctaaccagagaataccatttatgaggaaactagagacaaatgcatcttagatcagctttctagagagcatatggggcaacggactatgctgttgctgtgtataccccctggaagaaagaattcctgcaatgtaccaacctcaagaactcagaatctgcaacaccaagaggtctcatccaggttatataccactaaaatggctggagcctagagaacaactgcttggccaatctgcctgcaggtaggacacagagcttcatgaatgctctgtccctgagccatccctccttctaggatgggaaccccaatgatgaagttgcctttgaacctcccaatttttcttcctgtaagaaatctctataaacttgttgcttccaaaggtcaacaccaaattttaaggtttctctctgaaacaacaaacaaaaacttaaacaaaacatgaaggcaaaacaaaacaaataaaaaccatactgctttcctctgtaattttatagacataaggatgtttggaaaaggataggtggtaggcacctgtgtccccaataaatgacaagatatttggtcattatagattttcagagaatatacagccctggtacctaatggagaagacttcttttgggatgctattaaaggacatgaccataaaagagctcaattgttctacataggaactaagatctcccagaagaacatgctgggaacacagcaaggacagtttggagaataagcaagctagacttgtggccagttcaaaagactaaaagattatgtttgctttttttcttagctttatcatcaaaatgaattacgtgcctgtccttatatgtttcaactctacttgccagatgtcaccaaagaaacctattttctagacattttttcagatattctgtcatctaaaaatgtttatgcatacagtctatttttctgtggttggccacataaatttcagacctgctgatcttatccatcttgaagatcctggcagtttcacagctgtttgggggaatcgagatactgttctctggagtcttaatttgtctcagagaatgtacaagcacctggaatcatagaagaatggtagatgcatccttccagccagcctgttgtcaggtgtgctcctgggcctcattacagcatcctctacagggagaagcttggctcagttttcaggttaagcaagggtgatgctgtttatagctgtagagacacagggaagaagagaaagtcatataaatcagttcaaatgaagccataaataacaaaaggcacacatgacactccatggacctgtgcttcaaatcccttcccatttgcaggctacacatttgtattaataatgatggcattcaaacctgccaatatggaagggatggaagccaggtgaataaattcaggtgagatttatgatccagcagcatagcctcagttaggaaagaaagaaaggtgtgtctccagaggcagctgatcccgtcttggcacgtagagtgctgctgaagtcacagtttgcagctgttttagtcctgtcagtgccagttggccagctaatggaaatggtagaagaaaagaacaaaatgtcaccacagagaagagtaaattggaaattcaagcatttttattcctttataatcctgctgaatcaaaacgaaatcactctacaaatttgccatctccatattaacaaaaagcaggtaggtgtacaaaccattcagggaggaaagattgactggcattcttttgaccattagcttgttcaaatagcttcatgatttctaataacttggcgaattagtttataaatgacaatattgattttaaaagtgtaatttttagtggaaaattgcagtgcatttggacacaggccttacattaagggtccattgtagtggtgtagcggggtcaattttaaactgttattttgctaataacatatgaagcattccataaacatctttctaatactgttcacctggacttactatatgatcatttccaaatacctcacacaaagctatgaaaaccaattctctatacacataagtcatgattttaacctccaaaatgaatgagtgtgttaatgcccatgatttactaattttaagcattcatataatccagcacacttacttttatttttagctttagagaagaatcttaaatgtattaccaaaacaaacacaagaagatcaaatgagcatatgcccatcataagtttagtgtaagataacacaatatgaaaagcatatattgttggaacatcacagctgatacctctataaacacaccaaagaccatccttcccttcagagaaatagccaccttaatgcctcacagatgaactacaagtagctaaccaaaggttaaaacataatgtgagtttaaagcgcagtgatatggtggcttatccatttcttgccactgggtatatagaagaagttgagttaatattcacatggcaaagagataaccaacattattctatgacttctctaaagcacgggacccaagcttcaagcaccatcctggtcatcatctggccttatgtgcaaaattagtcttgtatcttcacttcgagattttgctataatgctgtgtttctctatgtgtaaacaatttactcatattgactaatgataaatcatagctctatcaatatattggaatgtatttgtattttcaatagaatttagcaacaaatagttatttctatatagtgtttatgtgccatttattctgtacaggttatcttctggtttctcaattgtacatgaaattatcaactgtcattttataaacaagtttgacaccccagtctatttcgtttgccattgatcactgaagaaaccatatactgtagtactatacactgtactttaaaaccctttaaaaatcgcaggactttgggaaaactatgctacacctgaagcacaagtttctatcacatttttagaattaaaaagctcacataatttattacataaatagttcagaatcctaaaataaagcttctgcattggcagagtccaaatctgtctggcatcaggtttatccaatggaaggttagcaattcctttggtttcctgttggaataagtcgtgatactaagtgtcttttctttagcagtaagaatatgaaattgtggttttgctttttcactggagaacagaggagatagcatagaattgtgtgtgtgtgtgtgtgtgtgtgtgtgtgtgtgtgtgtgtgtgtgtgtgtttgtgtgtctgattcctgaacattttcagggtaagtgacttaccagctggcatgatctgcacatttatttacagcctgtcctttaacactattttgtcaacagcatcactgaccaccatttagtgctcagtgtttgttgctgggtagatttctttcatggacgctcctttgtgctcctctcttctgtggttcatatttcttggatgtacaactttatctgcacagctccaaaactcgaatgtgttatctctcagttaaaaatgccagttgtagcccattcactatcagatgaaagcttctgccttctcaacaagatggcgtcttctgttcaactggggtcctcagaacagtaacttcattacaacatgcagttgcctcagaattttagaaaagagcctctaaagcaggcgtgctcagtcagagtttactttacaaagattgctcagcatacctgtacactacatgtaacaggagattaatatccagaatacataagaaacttaagaaaaactcaataaaaaaaatacataaaacaatcagaatttaaaaaccaacactagacattcctgtgtaagttttatatgtaacaataatcaatatgaaggaaaactgccacctctaaacaccaggggaatgcaaatcaaagccacagtgatatgtcatccctctgcagtgacggtggtgagtctggaaggactaaatgcaactgcaggcaagagtgtgacaagatgaaagcacgggtgcactgttgtgggaacaattaagtagtgtaacaactatgaaaacttcatgaaatctaacttaaaatagtaaaattactgtatgactcagaaaacccatcactgggaaatatgcagaagaaataaagtatgtgtgttggaagagatatctgaattaccatgtttattgaaacactatttacaaaggctaagaaatagtaacaggctatgtggctagcgagtgatgagtgaagaaaataagacacacatacaccacaaatactattcatcagttagaaaaaaaaatctccttatttgcaacgacttggatagtactggaaacaattattttaagtaaaaatgagccaggcatagaaagtcaaacaccacaagctctcattcacatccaggcatagaaagtcaaacaccacaagctctcattcacatccaggcatagaaagtcaaacaccacaggatctcattcacatccaggcatacaaagtcaaacaccagaggatctcattcatatcctgtggagtctaaagctttgaggtttctgtttatttctatttttcaattaaaatgaaaagtcccccaaagtttgatttaaaggaatacctagctgttgtttgtgccctaaagtgtgtgaagtcctagtggcattgcctgcctcatgtcgtttctcatgctcccatcactccaggcttctacttctctgaaagtgactatcacttccctagatacagaataatccttttttttcttttactctaaccttccatatactaagttatgtttctgaggctgaaacccctccctgctcacctttgtacaagctgggaaacctggtctgccctccttcctccaacctgcccacttggagaaaacccctggctaacattaattcctcatctccacgtttcctgttacctactcaagagcacccacccagggtctcagtttgaccctgtatggacataatcccagctcttagcagacacttcatcacttctcccctaagctctataaaagccccctgtctttagcctggacctgtgagatcagtgatcccaccagaactgccttctaaaaaacttgcctttatctgcttttaatctggtctaatctggcctatatcttcatgactaaggaagagaaaaatctatcaatttctctgtgcagaattccctttccatgacttcctaagaaaatcctgaaaacatgtaaaacaaaaaatagaatgaataacttcaaatcttatattttcaagcatgcagtcacttttctccacttccatagcatgtgtcaccggtttttcttttgaggtcagaaccatctgctaatgtgtctcttcccctcactagattgtttttgcttctctgatacagagtaaaattcaaataatatgacagcttcatcaatatctgtccaaaacctgtggaagagtgtactgcatgacagttccctgcgtcttgcccaacacaacctaactttcctacaagactgcatgagcaatggcatcagatctcatgtgccacacccaaaatgattaagtccagtccttagccacagtgagttaatatagtttggctttagatattgcctgctgatagtatttcttataaatcctacctaaaataataagataaagaggacgcataagtaaaaaataggctaaattataggaaatcacacattgtttgaataataattaagatctatctgtattcaacactctaaacactgtcaaagatagggcaaagagtgatacccacattgccgaaaattttctcagtgtggtttttgactcaaactaaggtccagcagaaattgttagaaactcgtaggcaatcctaggcaatcgtagtctttcaaacacagttgactcagtgaaggagtgcttcttttctattgaaagccattaatctagtaggactatatgcattcctcccagatgacaaataaatactcaattaaaatcatatgtacattttagagaggtatttttgatgcctatcttgatgaaaagagataacatcaaagcacagtattcaaattgtattacaaatcaagtttgattaaaaggaaagtaaactttgagtctcaattgagaaaattttatttttatactaacagatttgaattatagaaaacattactataatttatcattgtatcttgatttttgtttgtttgtttgaggggttataatgttttggaaattcgttgactaatgcacactaattttacatgataatggctctcattactccatttcatacacatatacactatattttaatcgttttcatggttcctctaagcctctcttgtttccttcctactccttttaagcacgcttccaaagctttgcatcttcttttctaaactcgcctcagctctactttcttatctgtactgtgacccagtgagtcctattcatgttgtttagagtatgggtggtatctccctcagaattattggttttgtctccattcatttacattaaaattttcttaactttaattttctttccttttggaaaaaaaaatgtttacttacattccaaatgttgccccaacatcccagtccccccctccaagagcttttcacccatccccctcccctttgcctctgagagagtgctccccacacactcccccacccacatcccctcaccccatcccctgcatcccctttccctggggtgtcaagtctctatagggttaggtacatcctctcccactggggccagataaggcctctactacctatgtgccagggtcctcagaccagcgtatgcatgctctttggttggcttagtctctcagagctcccaggggtccaggttatttgatactgttgttcttcctataggattgccatcaccttcagctcctttaatacttcccctaactcttccatagggcttctgacctcagttcaagggttagctgtaagtatctgtatctgtcttagctgctgggagagctccaatgtgcagtcacaacatggcatcagtaatagtgtcagggtttggtgcctgtgcttgggatggatcccagttgggcctgtcactggatggcctttccttcaatctctgctccatttttgtctctacatttcttttagacaggaacaattctgggtcaaagattttgaaggtaggtggatgaccccatccctccactgtgggccctgtctatctacagaaggtggtcaatacaggttctatctccctactgttgggcattttgtctaaggtcgtccccattgagtcctggggggatctcacatcccaggtctctggaacttcctagaggttcctccaacttcccacctccacagatgcatattttcattcattcttctggccctctgggcttctcttctatttccccccaatacctgatcctgcttatacctgatcctgctttcccttttcccctcccactcccttctcccacccaggtcctcccctccctctgctgcccatgactgagaaatattttcttcacatattttcattcatttgtggatgttagctttgaatcttcagatacatgtctttcatttggaatagccatagagagcaggaaattagtacagaaccttcaaggaagaagagacagaatgaagtggtataaagacttaaagagggaataatgaaacaggaaggggtaaatgtgggtgggggatgggatggcaggactagaggagagaatactaggagggataaatatactaaaaacttctttaaaatgtcatgtggaaatgtactacagtagaaaatttctaaaatttatgatacacacacagattttaaacggagttaaactgtaacaagagaagaatgatcgtactaatcgcaggctaacaaatagataggccagggctgggagtgggttacttatttacacttgttggtcactggtgtccaatagaccatcctcaatggttgtaggctattgccattgattttggttaccctccaaaatatgacattgaaatgctatttctgacgatattacacacttgattcatgaaacaggggactcaaactagtactgacatagaaacttcatcccttccagctagctttcatagggctggaaggtgctaatactattagaagagaaaaaaatcatcgtaagttgtgtccagcagtgaaccttgtgaactgcaataatgactggcctggcaaggacacacctattggtacaatagtggcatgaacatcacaggaataatcaaccaccaaccatatttgatttgatttagatttcacttcaaaagatgaagcccatccctggcactattttcgggcaaagaacatgtgtctaggcaggtcatacaccccagggagaaactacaactattattctgttaacccactcttagtggcttaattttgtgtccaagtatcaaggcgactcttaattctcactaggcaactcttcttttggcagtagatggcacttaacacagacaccggtcaagaagcagaaaataaaagattatagaatgctcagccttaaacaggacatttctatcatactccctcctcccaaggcttagggatcattgtggaagatggggaagaaatattgtaagagccataggtgataaacgactacacaaagaatgatttctacacacagcaaggtggtttcacatacgaattcacagcagttgagagagaatgcacagaaactctgtagactcagatcagacaaaaatcacagcatggagggtaaggatggacacaaagacccacttctacagaaggagcaatcgagaactaacaggtactgggtgaggcagagacagttttctttaaggatgtgaatcatggtgggtcgacacaagttcaaagcatatacggaaagaatgagctgtacatgatgggtttaaatcaaaagggggcgaaattttgtgataaggaaaaataggagaagttggcaaaagggatgaatacgatcaaaatacattgcatgaaattctaaaagaaaaaaaaaaagaattaaaaagtgagtggagaagaatgaagagtatagatggatgagaggggaaccttactagctgtattcatttttttttaaccaatgtcagactttcttttggttttatcacataagaacctaatttccctgattctgcttcctggtttatacatcctaagatactttctgttttgtaaccaagagaaaaacattacccacctctgctctactggcaaaaccagatgagacattcagaactgggccgcatatctatcgcccttgcaatacactgaagcacttaaatagttcataaagaattttgtttaaaaagcataacaaaaatctggtgtgttttataaatatgcatttgaaatattttctagaaatagtcaccagattacaagattgtggaaaactatttggaaggaaaatgaaaaacagcattaaaaattcatatctccacagctcaggactagatcaaatgtatttaaagcttctctgtgtatattatatcattgatatatatatatcaatgatatatatatatatatatatatgtatcaattacatattatatatatattatatatatatatatattatatataatacacatacacacacaaatatatacacacacatatgaaagcagcaactcaacattcaggtaaacttccttcagatagtaaatggttataattttttaaaagctgaagattgccttcaggtgttgaagagctgaatgggctttggcttcctgcaacaacttacataattaaactcagcaagtagctcttccgatgtttactgtctgtgtttctggtgtaccattgcttccgaacacatactgagggctcttcagaatagaagcaggaaggcattttatttcactgtgacttgtatatatcccttaaacacaaagcaatttttttgtgtcaaaactttgtttcccttaaaagcatttgtggtagagtagttatgtcatttctgaaatgcttgctgtaaagtggttgcctgttagaaccacagtttccagagaactagatgaaaactcagcagctgcctcaagcagtcccctgaagagccaaagagatcacatgtgcaaagctctctgctctgaaagtcctgacaccttctgttccgaagcctaatgttttgattagaatatgacgaacgagctcacacagtcactgagatatgctaaggagctgcaagaattaaaatcataaaggaattaaagcaatttttttctagttgattagtttttttccaaggtgttgttttttcttttttttttaataaaatcaggaatttaatttaaacaagttttgtgattatttttctccaaattttctatttgcatctctgactttcattaactaaattgttatcttgtcctcaaaagtatcacttatccaactttgacattatttccaatatttttagcttttatgccaaatttttgtgactatgtagtaatacatagcagttcagaggtgggtaattttaagtctacttattatttaaacagttataggtgttggtaagtttttctatgatgtgttttaatgattatatctaagtatgggtctttgtgacactagcccagacatttttaatagttctaaaatagtcagtcaccacttctgattaaagatattcttataacctttatgtgatgaaaatcatgttatagagtaacatttaaaaataatagaaggatcacaggtctccaacatctactaaaaattcatggagtagaatttagcaacatcatactgttagataaggaggaaagaaaatatttactctaagagtaataactataaatgctttattttggatggttgttgatccaccgatatttgatctctttcttaaaatgtttacaaactgttgcaccaattataattcaaaatgcatggaagtagatactataaaaaatctgattttcaagtggaattgattttttttcctgacatacatcaataacaaatgcagttttcttataccaaaaaatttctaaaagacatattttatagacatttaaatctgtctactgtcatggaagacttatgtaagttgtttaataaaacctgccgtcttcttagatagttaacaagaaaacgcaaagtcatttcctttaaggtgatatagtgtcaatctacacagtgtgctttcatgtgccattgttactaatatttagaaaatatccaactacatagtatagggaaactttttttcctctgggtttattgaggcatactttataaataaaagtatgttatatttcaaatgtacaaaattttgaaaagtccatacacatggtatgcaataaacagcacagtccagataataaacaattcaggatctcacatagttaacatttatttgtatatatgtgaagaatatgtattatctgctctcagcggatgtcttttttttttttttttttgagacaggttttctctgtgtagccctggctgtcctggaactcactctgtagaccaggctggcctcgaactcagtggatgtcttgaaaaaaattataaacccctacaacatttccatgaggacatttttctgcagcatttcaaaatagccaagatacagacacagtctgagtgactgccaacagacaaaaggataaagaaattctatgtaggggtttcttggaggttagcttcctgcgttctttatatattttggatagtagccctctatcagaagttgggctagtgaagaatttttttcataatttgtaggttgcttatttgtcctattgactatgtcctttgccatacagaagattttcaatttcatgaggtcccatttatcagtttttgatgttagagcctgagccactggagttctgtttaggaaatacccccatccctgggccagtgagttcaaggctctttccaactttctcttcagtgtatctggttgtggtccttgatccacttggatttgagctttgtgcaaggtgacaaatatggatcaattttcatttttctacatacagactgaccgttagactagcaccatttattgaagatgctttcttttttccgctgtatatttttggcttctttgtcaaaaatcaagtgtctataagtatatggttttatttcttggtcttcagttctattccactgatcaacctgtctgtctctgtaccaatgccatgcagtttttatcactgttgctctgtagtatagcttgaggtcaaggatggtgattcccccagaagttattttattgttaagaattgtttttattattctgggatctttgtttttccagataaatttgaaaatttttctttccatgtctttgaagaattttgttagaattttgatggggattgcattgaatctgtagattatttttggtaggatggctgtttttagtgttaattctaccatccatgaacatggatgttctctccattttctgtgatcctctctgatttctttcttaagagaatttaagttcttgtcatacggatattcacttgtttggagtaaatttcttgactgagaaatggctcagtgattaagagcaccgactgatcttacataggtcctgggttcaattcccagaaaccacacagtagctcacaaccatctgtaataggatccgatgccctcttctggtgtgtctgaagacaactacagtgtactcatgtaaatgtcttttcttttctttcctttccttttcttttcttttgtctttttttctcctttgatattttctttatttacatttcaaatgttatcccctttcctggtttcccctccaaaaaccccctaacccctccctactccctctgctcaccaattcatccactcccacttcctggctctggaattcccctacaatggggcatagagccttcacaggatcaagggcttctcttcccattgatgactgacaaaatcatcctctactacatatgtacctggagcctggagccctccatgtatactctttggttggtggtttatcaaaaatgtccatcttgctgaaagcaatttacagattaaatgtaatcaccatcaaaatttcaactcaagtcttcacagagttagaaagagcaatttgcaaattcatctggagtaacaaaaaacctcggataagctgggtgtggtggtgcacgcctttaatcccagcactcgggaggcaaaggcaggcagatttctgagttcgaggccagcctggtctacaaactgagttccaggaaagccagggctatacagagaaaccctgcctcgaaaaaaaacaaaacaaaacaaaacaaaaacaaaaaacaaaacaaaacaaaaaaaaactcggatagtgaaaactattctcaacagttaaaaaaaaaaaaaaaacttctggtggaatcaccatccctgaccttaagctatactacagagcaattgtgataaaaactgcatggagttggtacagtgacaggcaggtagatcagtggaatacaattgaagatccagaaatgaatccacatacctatggccatgtaaatttcttaatgaaaaataatccacataaatatctgctctacaattcatgaattcttttactttgcaaaatcattggtctgttattaatttgtgtaaattagctcttttattataagatatatatgatgataagaaagtcaagaatatattaaacagattcatctttttatacagcattgtattggcagacttctttttttctattcaaccttcccaatattaatataactgtgaacaatgataggaagaataatatggccacctaatctttccaagatttgctccagcctcatgtcattcttagtattttagcctaaacatttggaaataaacaaatatatttaataaatggtaacatcaaggtgctaccttgtaatggtccacattaaaggacatcaattatgtggatgacatattttttaaatacaacttgaaaaggttgtatgatatacaaacaacaaacagagccccttaaggtctgattcagctacattaaataataaccaaagcagatgaattaaaaatcatggatgcttatgatatgtaaaaacagcaacaaatctcactgtgccgtgtttgttccaagatagcttaaggaaaagagaatatagaatgcagtggtcaaggtcttacttctggatagtaattaattcctacactacaaagaggaaaatacagttattttaattacagataaattgtgaagcccctgcttcctctctaaccaagtgcacctgctcactttccctctgatagaggatactataatttcttaactttgccttcaattcagcccaactggttccatagaaacacctgtctaagaagtcacacacaacctgtaggccctgtgtggcatctcgttgtctccagttgggcaacttataggaacttgtccccttgagaccctgcttctggaaaatgctgtgccccatgttcttcagcttccatgtctttcctggtctaatttctttcatggttttgatagcaacatttctgtctttgacacccatacattacatgtttccagtagatacacatttctattctgatgttgcctatccatctattattatgttttgctctcagctagatcacccattgtaatggttttttgatatgtatctcaagtcatacctcgtcatcatatgtcctcaggcattagatagggcatagggcatactagccccgagatctgtctggaaactctctacttttcctcctcagcattgataatagagacttaagaggaaagcattcacatagtccaggaacaccaacaataaagcattttgttgattaaaatgtagcatctacagataagttgtatgtagttataaataaagtcagaaagaatcaatgtactttggagaaaaacagcttgaaggagtagaaaatcctcagtatgtgacaccaacaatataacattgtaccagaaggaaatttgcaaagatttttttttctgacatggcctgcaggatacatactgcatcaacagtatgaatttgctgcttctctcaaaggcaatctaagagccataagtaagaacatcacaaatactcactgtcatggttttgatcactcttactaaggtgattatgtaacataaaatcggccatgttaaatatatcaagtgaggaatacagtaattttaattacactcacaatactacataccactctgtcttaagaacctacgaacatgctaaacacaggccatactctctaagcaatgtctcctcattggtaacttctaatatactctactctaagaaacttctgtaggaagaatcatgcaagatttatccttgagtagttggtttatgtttacatgaatgatgctccacctttgctttatcatgtagcagaattgggtcacacttgtaactaaatgatatcccatcattgtatatacattgcattttatttatttaattataagtacatggattattaggctgtttctaactttttgctcttaacaataacattgcaatgaattatttgaatcattatgctgtacttgggagtattttgtttttgtatagctttttcattaatcattttattcatttatatttcaaatgatattccccttcctgattaaccctcccaaaactccccatcccatcctgccttcactgcctttgattctatgaagtgctccttcacccacttacccactcccacctcactgctctaggatcccccttccctggggcatcaagcctccataggaccaagggcctcctcttccattgatgtcagataaggctatactctgctacatatgtatctggagccatgggtcccttcatgtatactctttcgttggtggtttagtccctgggagctcttggtggtccaggttgttgaaataattcttcctatgtggttgcaatccccttcagctccttcagtccttcccctaactcttccattggggtcctgtgctcagttcaatggtgggctgtgagtatctgtatctgtattggtatactttgaggtatttttaatgcacaatagtaaaggaaatttctgatacatgataattccatttaagagccatcatattagaaagcatccccacaaaactttacattatgatcataatgtacaagggctacttactttcattaatatattttcaagatatgaatggttttagtttagtgcttggtgatttaggttttctatgtggaagttggtgtgatgaagtaaacataattattaaatgatttaaaaattgaaattgtaaggtagcgtaatgactggaaaagaagtatgcagatcaacagagcagtgtaatttctgtctatagaaggcatggaatggtataacattcgttttatgacaaagctttaatatttgaatacagttgtgtctttcattgcttcgtggtaaactagtagccatgtgggatataacatatggttccatttatctacctttattttatcagtaacgtgtctatgtttagcaacttgtttgtgtcttttattatgactaaatgcatttttgaacttgcttaacacattaacaatctgtctatggaaatatgtggaattaattgtctgtgagaatgggcattttttaatggcctaatggaagtaggaacacagcaggtcacatataatggatgactgataacatacctgcttctttctctacttactaccataacagtggtaataagtttattttataacactgagtcatcatgaaattattaaacaaaattatgttttcaaaattgaagacagtgggtgtactggctagttttgtgtcaacttgacacagctggagttatcacagagaaaggagcttcagttgaagaaatgcctccatgagatccaactgtaaggcattttctcaattagtgataaaggggaaaggccccttgtgggtgggaccatctctgggctggtagtcttgggttctataagaaagcaagctaggcaagccagtggaagcaagccagtaaagaacatccctccatggcctctgcatcagctcctgcttcctgacttgcttgagttccagtcctgacttccttggtgatgaacagcagcatggaagtgtgagccaaatcaaccctttcctccccaacttgcttcttggtcatgatgtttgtgcagaaatagaaaccctgactaagacagtgggttatatttttgtggctaattagagagactcatgaggccaagtggggatagacaaaatggccttgtaatatcccttgttgcattgtgatttcttgactgatctactacaatgataataaattgaggacatttcagtgaatgtctgatattttaaatgttactaaaagcatttacacagtcacattggcctgtgtgaagtcagacaaattattgtatttgtaaaattaacatgacctttatgccttataagtataatatgaataacttgtgagagtctgtacattctccacatagacaaaacgtcttgctcctgtgttgagctctgttgtcttttttttttttaatgctgaatgtactggatgaatctactgtacaggaattatttttccctgttgtctaattgcccacatagaatggaatctaaagttagtatagcagcagtgctcatggtaagaattaaatatgtgtagagcattttgagatcttgagaaatctgttaaaagaaactttagataagacctgggaagaaagaatatcttgttcttctagttaaataacaaatttatgaatattttctctctttcaatctctctctctctctctctctctctctctctctctcatcaaaataacaggattccttatgtcctgctaaaatattgcaaatcaacttctatgttgatcttcatatgaattagtaattccttgatcctatatcggttttccgttcttataatttatactttatttaaatacttaaaacttcctaacagcattttagcttctcaataagaacaaagtgaagtgtagctgcctgggtcctctacttttaaacatttgactttgtttcagatgaatattcactattcctatcaaattctcagtgtatgtaacaaaccacactgttcactctactttactctatggtcctcatcaaatgccaacccactggaagaacctgatgttgcatcacctgtaacagatccatccatttataagttccaattttgaagtcaaatacagcatccctatgacattttacatagttctacaaatgcaaactcttccccacctcattaatacaatgagatcttccaccagcactgatatactttctactatactattctagaattatcatttgtctttataattgtctttttgtatatttgagcttcttggattctggggtcacatactcatcatcttggactgtctcaaagtaccaataaatatcatcatgtagacagcgaatgttgaaatgaagtaaaaactttaaattgagttgaaattcacattttcatacataattgatcaaaggtgattttagggagagtaaaatatattcttcattaagtaagagttaacaaaaaacgtgaaggccatggtcatcttttgaaaagtcaagtgctaattagtgttattgtttcaggaagggatatgtatgaattgtggcctattttgattcaatatcatgttatagctattgcataaagtaaggaaaaacaaattcacaaaaagttacattttactctcactaccaaatgaaattcccaaatatgccaagatccattttatacctatctaaatgtagaaaaatgtttattcagtaatacacacaaagtatcccagtgactggcaagaagagatctatacaaaatagtgtctacttcctatttttgcctacagtatttctcaaaaatcttcttaaaattcaggtttattttatgctatatattttcaaaaagtggtatattttctatgaaatagcatatactgtataaggtgaaatatgcaaaaattattatgcacttctggaatgcttcatgactatatacacataaaacataactatgaatagtgaggtaatatagaaaactctatgtcctttgcaacaggtcagttaattagtgtgttgcatgataacaattagactataatttaatatttaaagtatcctggtaggattcatgtggtgaaatccaaacgtagccttacagaataacaagagcaagttttttatatccaattgcttcacaatagtcacacatattttcttgtcttcagtaacataagagcaaccagggttatatttttgcctatacctaacttaaagaattgaggcaggtacaaataaaagtatcatctttcatcatataaatacagaattaaattgtcaagaattgatatatttaatctactacatgtggagtagattttaattcaaatatttttatatgacaagaaatgaacatattgaccagaaagttctgacaattaattgcagaattgctgaattctgacaaagcgctctaagggaaaagtgattaaatgaatgtgctacttgcttttaaatcatttacagttgaataatttatattatatttaattcatccatttacattatccaagatgactacaaaatgagatgaagtttttaaattatcaagtttttgcattaaaatgtttgccaataaacacgttccgtttttttaaaattattattttaatggttttgtatattgaaataggagttagaaggctaagctagagtacataatataatgagttttcagggctataaatatttgacctacatctttagacattaaatgaagccctcacaaaggcatgctctgtgttcacttagggcacacataacctaattggcaactgctcagcttttctcccaaattggcccaccttacgctcacatttctgaatctaacagtctaccatcggtttccagttgttcatccaaaaacctttacaaggcatcctcaacattgttctctcacacccactggaaaatcccatcagaagctgcctatatcgagttcactcctcacaaacacctagggccacacggcatgcccacctactctaactctctgtctctcttgcctcctcccatagattgaaactgcctttagggattttgcctggctcttgtccttgtttccctttgtcttctccagacgaaaggatggaccatctagagactgccatatccagggatccatcccataatcagcctccaaacgctgataccatttcatgcactagcaagattttgctgaaaggaccctgatatagctgtctcttgtaagactatgctggggcctagcaaacacagaagtggatgctcacagtcagctattggatggatcacagggcccccaatggagaagctagagaaagtacccaaggagctaaagggatcggcaaccctataggtggaacaacaatatgaactaaccggtaccctggagctcttgactctagctgcatatgtatcagaagatggcctagtaggccatcagaggaaaaagaggcccattggtcctccaaactttatatgcctcagtataggggaatgccagggccannnnnnnnnnnnnnnnnnnntagcactggaaatgtaaatgaagaaaatacctaataaaaaaataagagttaaaaaaaagaagaagaaaaagaagctactctatgaatagaagacagaatgtatcaggcttttaaggcagccagtggcttcctgttttgcttggcataaaagccaaaggtcttatcataggtgccacagcaggatgagtactactattctggctacttctcctgcgtggtcccctagcactctctttttttttcttctgtggcctcttcaaacacactaagcatcttctcacctcaaggatgcatcagaaatttctttatgttctacgaaggcctcactattactttgactcttaaagagaaccctggaatcaaatccttaatgctaatagattgatggataactgagtatttataaaattttatactttgtataatactctgctaggttttacatatgaagatgaaaggaaaataaccttcatataagtctttgtgctattaaaaatggatagctgtgtgactatataagtaacattgtatgcactgagcagattgtatgtatctatttagaaattatatatatatatatatatatattcctaatatccacttatcagtgaatacatacaatgtgtgttcttttgcaactgggttgccttactcaggttaatattctctagttccattcatttgactgcaaatttcatgaagttgttgtttttaatagctgagtagtactccattgtgtaaatctaccactttttctgtgtccattcctccgttggggaacatctgggttgtttccagcttctatctattaaaattaaggctgctaggcacatagtggagcatgtgtatatgttggagcatcttttgggtacacacctaggagtggtatagctgggtcctcaggtagtactatggccaattttctgaggagcagtcaaactgatttccagatggtacaacttacagaccatatgaaattcaagaagggagacttagaagtgtggatgcttcagtcctacttagaagggggaacaaaataatcatggaaggtagaaggtgggagggacttggaaggaagaaaggaggggggaggaaaaaggaggagagggatcaggtgtaggaggaaatgggggaagtgtatagagggtcagaaaattgaacagaggtgtgtagcattggggatagggaacaggggtaaccaacagaaagtcccagatgtcaaaaaagcaagaggctcccaggacccaatggggataacattagctgaaatacccaacaaaggggagagagaacctgtagagaccttatggagaaattaggcatggcccctggttgaggaatgggaacacccacccttctcaaaatttttaacccagaattgctcctgtctaaaggaaatacagggacaaagtgtggagcagagactgaagaaaaggccatccagagactttcccacctggggatccatccaagatgcagcctccaaacccagtcactattgatgatgccaagaagtccttgctgacagtaacctgatatagctgtctcctgagaggctctgccagagcctgacaaatacagatgcagatacttgcagccaactaggcatagggacctcaaaggaggagttaggggaaggactcaaggagacaaaggggcttgtaacaccataggaagaacaagaatatcaactaaccagaaatacacacacacacacacacacacacacacacacacacacacacaccagagttcccagggactaaaccgccaaccaaagaataaacattgagggacctgtggctcctgctgcatatgtagcagatgataaacttatctggcatcaatgagaggtgagtcccttggtcctgtgaagggttgatgccccaccataggggaatgctagggtggtgaagcagaaatggatgagtaggagagcgccctcatagaagcaggggatggaataggggagttgtggaggaaaaataggaaaggggataacatttgaaatgtaaataaataaaataaccaataaaaattttaaaaagaaatctatatttctaatattatatattaatatatatgttccgtggggggggggggggttatcaacaactactgaaaaataggccatgaatttgaaaaaagagcaaggaagattacatggaaagtttggagggagaagcagagaggagaaatgatgtaattatgttataatctcaaagaaaggaaaagtaatttccaagaaataaatttcaagccagctggaactaatggtgtagcactcagaagacagaggcaagcgaatctctgtgaattagagtccagcctagtatacagagtgagctccaggacagccagggctgttgcacagagacccctgttttagaaaaacaaacaaaagaaacagacaaacaaaaaaagtatagaagaaaagaaactcattttttaaaaaaagaagtagatactgagttttgtttaatgtaattctttgaagtaccagacaatatgaaaaggttagatctatgacttcttggaaccaagactgactacaattgtcctcaaagaaaaacaaatagagacacatatctaaaagtgaatgtaaatttaaaaatctatacccaggcagataagatatctatatcttagctgaggtgtgaaaatatgtggaagcagtttaatagttctgtcactggtgaagtgacatatcagttttatggaaaggcagagtgaaaggaggtacaacactacacaattaagatactgtttgtcagaacaaatgatattcctcatgtctaggaacatacattacaaactttaggaaataaaattaagtcaagaaaaaacatgtcccataagaaagtgaattacagtgtggtgagcactttttataggaaacagatttccagtttctgagtatttccacgaagctccaagtttaaattagtgaaccgccattacatccagttttaacatcaaagaagtgaccacaggttaagaggaaaacttggctagatatagctacagtatttcaccacagtgtgattgcgtgtatgcaggtgtgtgtgtgtgtgtgtgtgtgtgtgtgtgcttttcattctaggaccaaatgagtaattgcagttttccatcagatagttgataaaggctttattgaaaagggctttgcttaaaagcaagctctgtttgccgaggggtaaagagacagggaggtagaagtgtctagaagtagcacaatcagaagtagcacaatcagagtgtatggaaaatgagggtccagtctgggaaatcatgagactagtttagctgtggctatagcaggagaagtaaaaaggaagaagggtagtgtgaaaaatgggcttggagttgagtacatcctgaagggccttgtatactgctgtggtgaggaacatttatttttcattttaaatgaaataaaatttagagaaatagtgttttgcagaaacatgcagaacttgtgtactagtgataggtctctatgctggacttgctagtccactgctggctttactactccaacatggctccaagctgcaaaggagtcaagtaaagactttaacttcctttctttattttcacattaaacatgataacagtgcatatcaacttcagaaatttgttcatattgtgtttaataagcctctgatacattctatcatggtctaacattccaaatcattctaaatttgtaatataatatccctgaagctaaactaaatcacatgtattgagcttgtatacagctcaaaactttactattgaaaagggggaaagcaggcatctatctgtagatgcagtgaaggctttctgacctcaggaagctatgatgagaggatcaggagttacccagggcccccttattgcccgagcttttgtccccactggcaagaacacactcaggacaactggaatcttctgcagcaaagctttattgcttacttctcaggaagaccccgaccccagaaaatggcactgcttatatagcccgcagtgtgacgtttcagcacctgatgtggtgtgacagctcctgattccttgcttgcccatcaccccattactactccccgagatgggcagtactaggagtgagttcactctcgcccctgtgtacaaggcttgtttactagttaggcacagcagaggccagcaccatcttataatggcaattgcaagtggcttgcgattgctcgtggcctggctctccataccccctctcaggtcaatggcctccaagacctttatcttgaaaacacagagttaatttctcagacaatggaggggtgagttttataaaatagctttcattgagaaaaggactcctgagggaagcacagcacctacaagcaggagaaggtcccaagatcagatggccaccagaggcatcatctagaacttaagaggacatttttgtgataagacatgttgaactggttcagttcagttgtcctatgcaagaggtgttcatgttcaatttcaggaacatgttcttttttaaattttatttgaattttaatttattttttacactccatattatgctccccaccacccccatccacatnnnnnnnnnnnnnnnnnnnnnnnnnnnnnnnnnnnnnnnnnnnnnnnnnnnnnnnnnnnnnnnnnnnnnnnnnnnnnnnnnnnnnnnnnnnnnnnnnnnnnnnnnnnnnnnnnnnnnnnnnnnnnnnnnnnnnnnnnnnnnnnnnnnnnnnnnnnnnnnnnnnnnnnnnnnnnnnnnnnnnnnnnnnnnnnnnnnnnnnnnnnnnnnnnnnnnnnnnnnnnnnnnnnnnnnnnnnnnnaacatagacacgttactgataaaataaaggtagataaatggaaccatatgttatatcccacatggctactagtttaccacgaagcaatgaaagacacaactgtattcaaatattaaagctttgtcataaaacgaatgttataccattccatgccttctatagacagaaattacactgctctgttgatctgcatacttcttttccagtcattacgctaccttacaatttcaatttttaaatcatttaataattatgtttacttcatcacaccaacttccacatagaatccccccccccccagaccactcttacctgggaggtcagagactcccaggactcaaaggaagggaccttagatgaaacacctaacagtagggagagggaacttatagagcccacctctgacagaaagacaggacattaagtgagagatggggatcccatcccatagccacatctctaatccataattgttcctgtctgaaagaattacagggatggaaatagagaggagcctgaggaaaagaaggtccagctacaggcccaaagtggatctaacccaaggggagttcccaaggcctgacaattacatattctttaatctcccattatattacttctgtttgataatacgcagacagaaaatgaatggtgaaataaattatagcagtttcatagtggtcctcttcactatttagtgtgcatactacctatcaaattttaaggagctaaataaacctgtttaaatgggctgtttcagaaactaagctgctaaagtataggagagcaaatcttagaaaataattttttgtctttttttaataatcattttcttcatttacttttcaaatgatagctcccttcccagttactcctccatattctgtcccatcccccattgcccccttctcctttgcctctatgagggtgctccttcacccactcccgcatcactgctcttgcatccacctatgctggggcatcaagcttccacaggaccaaggaaaattattacacagcctttgtttcatagtatcatactatcttatggattattgcataatatggaaatccatttgcaaaccactatgcttcataagacacaaaatgacacgcttctaaactgtgctctgtgttaagtgaaggataaagacaaggctggtaaaacgctcttccacaggcaaatgtttcatgtgctaacaaggaagcaaattaagtttgtgacaatgagttgttaattcaaaaggaacacacgcaaggacacatgctgtgggctggaaagctcaaaagttttagttccagcatctttttaaagaccttggtctggggctacatgtctttaacctcagcactgggcatagagacaggtggaccctgggagcattctggatactttgtctagctaaatggcaaggtcagtgaaaggttcggcaagagaccttgcttcactcaagtaatgcagagaagtgactgaggaattatcaatctcaggtcgctacaagcacttacatgagtgagcacagctctcaacagaaacatatacacaaattaatagttgcaacttactcccctaggacccaccaatgagcccgagtctctctgcacagaagtttccagaagggtacattccatcacagcagcatatataagatccatttttaagcctccaagccaatcaaggaatactttgaaatgtgcagtgtacattttaagcaaaaatgatatctgtaggtattctatatgtttgcttaatttaattaaatttaaattaaattgaataaacctgctttcataagagacttactgagtttctaacttatttttatggctattgtagggaaattaataactttgataataaaatgtagacaagcactgaggaggcagaggcaggctgttttctgagttcgaggccagcctggtctacaaagttccaggacagccagagctatacagagaaaccctgtctcgaaaaaccaaaggaaaaaaatgtagacaagatcagaattcattattaggctgacatttcttctcactgtgtgcatttgtaataatttttgaccacaacacagagtgatatatgtttctagtactcccacaaaatatacatgtaagatatacatggaaagataggtagaaaaactaaaagatgttctcccccttttcccattgaatttttcaactgtactgattcagaaacactgaagaacccacatgtactgtcgcaagtcttttggtaaaagaatattcattatcacattctttaatgctacgtaagactagaagtaagatcctcaattcttatccaagtttggtttgttctctgatgcaaccttcctcaagtcattaaacattttgggaacataaattctatagggcagaataaatcagtggggccgggtctccttaacaaagttgtaaaagttgaacttaagtgagcacacatgccttatgcttttattgtctaagtactctgagcagaagcataggaggagaagggaattttgtactccatatcatgctgagggcgtgggcaagagaacagcatatgaagctgcagataattaattttatatagttttgtaaattcctgaagccaactataatcctgtgcatgggccatctggatctatcagataagagacaatttatgttagtcttatacacttgtgagtaaagggattaattttggtcagagtatcaaagttaggaaaacaagccattagctattccaaaagaaagaaaggagaaaatgaaacacaatagtaacaagatagtaacatgccgaagcattcaaaagaggatgaagtcagtctggaagccaccaaaattaccgagatcctaagtgatcccccctcttgtgtgtgtgtgtgtgtgagtgtgtgtgtgtgtgtgtgtgtgtgtgtgtgtgtgtgtgtgtgtatgtgtgtgtgtcttttgttagaactaaactgagaaccttactagttctgacacttatctacagttccagaccctaagccttttaacagattcatttacattttatagacttactcctaagtagggaaacctgactagatgctactgaggtcaaagcaaacagacaaatgcatagatatatatttgttggctactagatttaatttaaacctcatctaaggttttagttttactccttgcaagagaaacagatattattttttccactaagaaggctgcaatagcaacaattggaaaatgggaaacaggatatggggagaggcaaggaaccataatagttcctctggtatcagtgtcaatgccaaattgtgatatctgattgcctttttagaatacacggtgctaagacagtctttcaaaattggcattatttggaattaaaaataaaataagttctggataaacaaaagaaaacaaaattataaaaacaaaaccaaataaacaaacaaaaataacaaaaaaaaattcctttaaacataattttctgctcagtttttataactcaaatacatttgggaatttttttaaaataattaaactgagtagaactttaacttttcttatcatactaaacaaacatgtatgctatacactcaaaaacagtgaattctaatggctagaatcactggcagaaaatctaccatcaagttttctcgtcatccttcactgaaatgccatttatctattaagaaaatctttagaaatcaccggttcactaatctgccaattcatctaacttttatgtaattacacactttactcttagcatccactgggaagaagagcagtggacaaccactgtccccctgtcagctgactgctctactgaaatccaaacaaaaccacagcaggacctgcttttacccttcatccctaagattgctatgtaatggggggaagtagctatagagaaactaacagtgttgttctgatctcccagcagtctttctcccatagcttgttttgcagatagtaggaacttttttaacaaactgttttcctactcaatgacaaatcatttacattggaaatacagattgtttttttatatattgaccaagtgtttcaaaaactaaagaaaaaaattaacatagtgatgtcaaaatttcattcaaatggattgagcttgttttgctgagaagtgacctgaaagaggttacttttgttttcaaacaacatgtaagctcctactttcattcaagtttgacattattgttttggaagctttaagtattatcatattattatgtatatttttgtattaccagaaggtatttgtgtatgcttgtttaagatacaaaagacaccttccattgggtatgcttacttatgcttaaggaggttaatgtgtctctattcagatgtcacttttaaagtttatttgaattgtttaggtgaagtattgtctaaattgacaactacttctttccaagctgacaatgtgtttctgttaatgtagctgaggggtgaatatgtcaagaaatggatgttcttaagttttcattaatcatggcaattattcctgccactgaccaagcatttaaccttacttttctactttcttccagactgaatcaaacagtattattatcacttaatactattgggatcaatagatcatacaatcatgcatattattcttaaaattccttcagttcctggcatttctgtgaaggatgacaaaatctcgctggtagattctctgccagtgattctagccaccagagttcactgcttttgagtatatagcatagatgtttgtttagtatgataagaaaaaaattaagttctactcagtttaattattttaaaaatccccaaatgtatttcagttataaaaactgagcaaaaaaattatgtttaaaagaatggggtttttttgttgtgttttgtttctttgtttgtttgtttgtttgaggaattaaaaaaaaattaggccaacatgaggtctggttatgaatgtgctttctcctcctccttcttcttctccttcaccttctcctttgtcacactccccttcccctccccctcgtcctcctcttccttctagctctgatttatttacttgcatagtttaactatgtgagtgttctttctacatgtacttctgtactccagaggagggcatcagatcccattacaggtgtttatgaaccagcatgttactcaaaattgatctcaggacctctggaggagcagaaagtggcttttaactgctgagtcatttctccagctccaaatgtacattcttcaatgatagactttttttttacaggcaaaataaaattaagagctggatatatggctccatagtagaatgtttgtttcatgtgtgtaaatttttggattatatccctggcatggagagaagaaatgaaagaaagaaaatagggggcagggaggaaaactcacttcaaaatgctaataatgccctatttagggctaagaactcgcaatcatttatttccagcactcaccagttaataaatctatgcattgattgctgtaacagagaaaatttggcagctaataatcgctgaactaaagagactaattattcttgggggtatgaacattgctaggttgcccatgctcctgtggatgcctcacaaaagcacacattcctgaagtactacttagatttagtggattattataccgaagagggcatgaagttagaaggaagatgtgtgaaagcagattcggggggagctgaagggataaatgaggagtggatatgatcatattttattgcataagtgtatgaaattctcaatgaaaaataaaaatactaacagtggtggtcacttcacatgtgaagtatgattaagaagcaatgacctgttttagtccctctgttacactacaaaatcacaatgatagtacttaaaattgtaattaagatttgctacttaggagattaaaaagaaacaattgaatgatttatctttatgaaaggaagctctatgcataacatctgttgcattttaatttattcaaaatgtttgggtcaatcatgctctcaactggcgggtggtcacttgcaggcatttctgaaaaggaacattatttaaaaatgcatgctttttataagtttggactaaacagatatgatgacatgatacatgagttaggaaacaaataagctggaattacaaataaatccaactaatctattgtaagatctcttgcaatctttgcaaaacatactgtgcacagtttggttcttggaataaacaagtgagcagacttctcaggcagagaaatgcccagataattttttttttaaaaaatcaatccaacctgtagataaaaatcaacatgatttccttaagttcttttgaaaaacgggtttcttgatgttgccattgtatttgcaatgtacagtgtgcacactaatctgataatcccatttcttatcaagtattctatctgacataacactaaaaactaacacaaaagagcatttgtctttgagaaaacatgtatacgaacccaagtttaagcagacaatcaatttaaaaattttttttcttggaatttaaaaacattaggtccatttgttaaaactggaacttagtttttatatttgcagaattgatctgaaaggaatcagccttgcaagggatgttctcttatctgagtgttcgtttctaagtggttgtccctacctccaaagtactcttttaattgttttccttaaaacactaatgtgtcatctagttgatgaagtcacatatcatgtgtttcttattaattcatcacctatatgtaagaaaaccaaaaaaggaacacataaactttggttaaaagccttccttaaaagcttccagctgtccctgtgaacaaattcgtattatagcaaagtcattgtattacaagtgggtgaccagagcccagcctaaagaggaaagaaagttagtagacatttcttctttcaaagcaatggaagagaaggccaaattctgctttcttgccactatgtattctgttgggcagcagctctccttatcagcattgcttcttctcattgtaaaagcatgctcagagtctagggtattctgagtgtagacaaatctgccacaaatgtactatgaacattttaaattagccacaggagttcttaatagtttaatcataaattatggactttttccaagctatgaaaactgtctctcatatgcacactttatttgcttctaaacatgttgatatttacttattcctcacatgtgttacattcaaagtaagctattaaaaactgttattctcagatgatagaaagaagtaaccagcatttttatttttattaggcccgacagtctatggaatttccttggagtaccacttggcatggtgctgttagactacaaagtaaactagtagcagaattttctatatcatacgaatttgtgttttcttgtgcttttttattgtcttatacaattattttctacagtgactttactgcagaaaaattatggatttcttatgtttctccacaacttaatatgcttagcatctcaatgaaagttcgttgtgtcctgtctcctagcactggattatacacaagagccgaagcatatgtgagctctgaagagactagacataaaacctcatgtttgatcattgagccccttctcaattgagctatctcccaacccccgttaaagactctgaaaaagtaaattatcacattgcctgaccttattcacattctaaagcatatatttagaatctgtttgcaggaaaaacagaccacacttttcctcaaatcccatgacacttatttcagaaaataagtcttctctactgtgccttgtgcacaaatagttcaccgaggagcttccaaagaaaagcagctggtggatggttggattctgacacctcttctctagtaggatcactttttctttcttcttttacaagttttggtggcagggatcatctgacctatgtggattttatcaaggagacacgaagccatgaagataatcatagtctcaagcttaacacagacataagcagttatgaagtggacctcgaacttactgaacttaccgactttgttttataattcctaagaagtgatgtttgaaaagttactaggctctagaagaaaaggagtatttatttctgtagctagtacaatggtagagtactaaaatcccatattttcaaaactttctttactcagggcaaaagctactaaagtgatggcagtgagtctgaaacttaattatcagcagcctaatttgcctgtctgtgatatacacatcacctgatgccagctgatgtcaacacaaattaccagcatgcaagaaaaactaattgttccgcattattttacagttattattgattgccatggcctttgcaaatcaagacagaaatagaaagtataatcattcttgaggattagtctaacagttgctagggggtggggcgaggatgcttcagagcgctcctttaataacacactaaaaccacaaggtacatttaaagaggtttgaatgcatacacataaaatctggctaaactttcaaatgtgatctttaataaatataatctgctttaaggaaatatatgtcaaatttgaaaattatattttatcccttcttcactcagagattgtcctttatgcaaacgtagcttaaggacaaaatgaaaagtaagataggtttgcccaatatgcccgtacttgcaaacacattcagaggtcgtggaggaagcaacaaagatggagacaatgtcagagattatgaatgagactcctcctcctggcttatgtgatcatcgttttcttttcaattagcttaaataccacttgagaaggcttctgtttcagtgcatttctttggtacttagtgctattgtattgcacagtacacagctaagtcaaaactctgtaccacacactgtaacaggaacaaaagcaaaagaacacatggagtcatatagtgaaagttgtttgtcacaaactttacatccgtcataagccccaatgccacctaaccctttcattccaagaagacacccccctaaacttcaccccaactaaaatctctctctctctctcctttacgtgcatttttttaaattccattctaccagcactcaggaggcagaggcaggctgatttctgatttcaaggccagcctggtctacagagtgagttccaggacagtcagagctatatagagaaaccttgtctcaaaaaaccaaaagaaaaaagaaaaaaagaaaaagaatccattctagccaagtacattcaaaaggaatgacctatggtctggtgagatggctcaataggtaaagtaggtacactcaccaaactggatgacctgagttcagttcctgggatctacagggtagagaaagagaacttatgatgtttttctctgccctccacatgtatgccatggcatatgtgctcccgacaatgcacacaagggtttaacaaaatatccagagatttaaaagtattttagcccatgatgcctaaatgggaatgtagaacatcactatgcttccctgctaaccgaatgaatatgaaaacaagacaggggcttggcaggagcaaaaagagacaagcccacacttttcaccttaggattttcaagtatgacagcttatgcagaagtggtaaagaagacctgactgggtctggtgtatgcatcgttgaataaagaaatttcccagggaagttctggcttagtcttctgcagattcttatgcagcctcggccaaggaataagaaataactatgcattgagatcttttaaaatgtatctgaatgatttcttgtggtattttttatacagctacttttaaagcaacagtacttctgagtaataaggaacacaaacttactaaaatctgatgtaagacaggatgtacatagaaacaggaaggtctatctgaaagtagtaaatggacctccactttgtagtaaagaagtcataataataatatagcaaaccaagaggtactatcactaacattgctaaaaacagtaaaaaataagatatatgtttttaagctcttaaataccatccccaaatccttgaacggtactaactaccggttactgcattttgattttcattaccacttaccatattatctaccaatcacatcctttgtgtgacatctatttcttctcagaaaagtgtgagtacaggagagtgtagcgtgcatggcagggagaacacctgtctcatagaccctcagacaaggagtaaggcttctgaacacagcacagatgtacatcagtccatgaaagagccagctgcacaacagtgaggaagcttttctgagcaaatcctaactgagaagtctgttgggttcctactgctcctgtagcatattgccacaaagcatgtggttgacaaacaacagctttgttaacagctctggaggtcagaaatcccagatgtatcttccaggacttcctgaaggtacacaaagggctgctttcatattgatgctccaaggaagaatttctctcctccaggattccagctcaaagagcagttcacaatctttagtttatgactctctctttttttcttttttttttcatattgccttatccctctgtatttccactgtcataattttgtgacggtgatactaatttcatcttctgctgcccttgtataagggtacaaatagatattcaaatataatctttctatctcagtatcttattcatacacacacacacacacacacacacacacacacacacacacacacacccctcttggtatgtaagatagcctagttgaagttctaaagattagaaaatgagcactttggaagggcattggtctgtctactatagggtactattagcaccacactctttggaagggcattagtctgtctactacagggtacatacgattagcaactcactcgttggtagggcatttgtctgtctgctacagggtacctatgattagcacctcactctttggaagggcattggtttatctactatagggcacctcattccaaggtaaccaccatagttttcttcaactgacaaaatgtcacacacctagaatcaccttggaatagtgaactcaactgagttgactccatccactagctcctggtcatgtctttgaggccatttctttgttgctaattgacataaaaggaaccaagtattatggctaatagcatccctagttaggtatgtgagttctataagaggctgaggaagccaataaaaagtgttcttccttgatctttgcttcagttgccacttcttcgttccttccttgggtttctcaaggatgaattataacatgtaaagtgaaataagccgtctccttcccagattagttttagtcaccactttatcacagctacagaaagccagcaaggtaaaacaccaacttctaatcaatgaaaacaagaatagcagccattggagaaacaaatgaaaaaaaaaaaaaaaaagattctcttgttcatttgtatggcccctagttttcttctttaagttccaaataatataccaatcatacttcaataacacacacttattgcatataaattttcatttggtcatataaaagaaccctgactacaaatgaaaaagagtaagtttctaagtagcttggtaaggtttgatatgtttctgctttgttcattctcactcaatcggaaataggagagcatatcacaacaggaattgccatgtgcaggaaatagagagccagtgttctgaaaatgacgtttcttataattcagctttaccatgagcagaaaatctgaaagttgagttcaaatcctgcttagctcaaatgtctggttgagaaagcaaattattgatttttttaaacatttaggcggaggtaagcaaattatcatgaaaaaatatattgtttagaagtgacagcaaagcatgtatcttgaaggaaacagattataaacctgtagatagcccggtacttggggaattttctctctttctccctcccaggttgttgatacttcagcatgagagacacatagcgtttcatgggttttaacaagctggagaattactttgaaatccagtattgtaacaataacctccaaattaatatattcttttcaaataaattacatttcaaaaaatgtaatctcttgcacacaaagtaacaacagaatatcatgagagcacccccagtcaaggctatgccctgtccacttgtatcatgtttgctctttgagttgagctattaagagtttaatttaaaatacaggagtaagctgcagtacttgattgcaagcaagcaaagaaagtaaatttttctcttcctctctttctctctcccgctccaacctcccgccgacttcctctcagagagaaattgccttattattttcttttcatcatgcaattgcaaacttagtaagtcaggtttgaatttggtttgggtaaaccacaacttctttttcttttttttttttttaacaagacaatgattttatatttgtgactcatttttgtgactttgggtatgactacttctttaaaaaaacaagtaacaggtttatcttgtcatcccaattactgatctatacaatttatagatgtccacaggtgtcttgataagtgacatccttctcatgatcattgcttgtgacttctttttaaaccacaacttctttggtaactgttgtactggggtaataatctcgatagtctccaatactgtgtgacttcggcttatctggagcttgtaactgtcattccggaataggtgtttgatagaagccattaaacagccatcaaggccttaaacagctatacatgagggaatctgccacaagtgctaccatgatttggctgctgagagcccttaagccttgcagcaggtgtgatactacttagagtcagtcttgggagcagggagttgacaacaatggccaaagactggagcagaaagaacaggcagcttgagtgtgaaagacagaagctgccttccccatctcccacctgtaatattgccaacccattaacagagctttggagttcacggtgtgctgagtgacaggagcagaaccatgaaggtggtaatggcttgccaggtttaaatgtagatgaataacctcttgtcagggcaaagaagtcgtttttatcctataaaaattctgtgcataactaatgagacacctgggccatcatacctgttatagtcaatttccagtttagctgtgtatctaacatgcctctacatgtggcatctaagctttggaaatggggactttcagaattgattaaacctgtaatagattaatatgcaaatgcctccctctcagttgcatcctgagtgtaatggacaacaatgatacaccagttttgaactactcctgatatccctacatcaaagatcagacttctttgattcgcctttatactgggaacatgtaaattagcttatgtctaatacaatagatggggatcctgggcatggcaagatggcaagaaactgtcatggtgagtgatttgaatcccagcaacttgttatgataatagtagcattctattatgtcactggatttggctgatgatatttcacagcaaaagattaaagaaacatcacaatgccagaacctttatgaatggtctctcttaacaatttttccacaattaaaattagtactcaggaacagtaataaacaattctgagaaagcttagagtcactccaataaagaatgtacagtgttagtctttccttcaattgttgagccaataagctcttgtttactttttgtatgttagtactaagtggtcaatagagcactttagggtagctgctgatcttggccataaagttctgataatcaagtttatcacacagagactataggagagaatacaaagtatcacatagtttctaatttcagatctattgtggatagaactctatagaacaacttcactgttaattgatggatttaaagtattttaatacagaaacaaatggacacaggttgtattattagttcatagactcatggaggaagaaagcaatctggttatatgtggagcaggtgaggcaatttcttaagcttcctcatgctcatgcccgaagcagttggcatttcatttattacccttcttattcagtcctcccactaaccctggggggggggggaagatactattattcccatttttatagaagaggagataaaaatgtggaagtgggtagatcaagtcctacagcttagagaaaagacagctttaattacatttcagcccatgcacacttatgagagtatgcctatgttccacctgtgaaggaagttctcagaaaccagaggtagttggaaattgaggatactggtcccaggaacaataatttcaacatctgtctaaggattaaggaaaggggatggcaaagacaactctaaacgtcttatgttagtggcctggaactagttgctagtccagagaggagaatctgttttcttagactttaccttctttggagttgtcaaaggattttatgatcagaaatttcttccatgtaggtattcaatcaagcttactttgtggagaaggaaagactaagattgaaggtccccaggctccttacctaattcttcttccaaataactaggtcaagtaggagatgcctgggtggggctgaggagacagactgtacctgtgcctaagggattttaaactgaagtggaaaggaggttaggtgctggagtccagggagaagagactatgtcttgatatcctacattcagtgaaaaattggagcagaaggctgcttcagcccccaggtgtcatatctatctcaatttctattacaggtgtttattttactaggacaattatctactaggtgcctagtccaacaagtggattaagagctacatccattaaagtagactgagttcccagaatgataggagatcacatgatcataattaagcctataacccgagcagacatggtttacagcgtgggttagaggatgatgacatatttctgacttcagaagacaaagagttttggaagaaaaaccaagtgtaggtgcaaggccaagaacaaaggaatttccaagtgatacttgagattttgtcatcagctttacacattcagagatggtaagaaacccataaacaggagattaaaaggtgcaaagagtatagacagggaacaagcttgattacatgggcttgcctagagattagaggcatccagctattttcttggatggtgtagcaactggtggggttttgcattgtactctcttggtgtgttaccttcagagtaggtagcacaggttgcaccagtgttagggaagcctgcaatgctatcaagatcaactcccctgattcacttgtctctcactgtatctgtccatcagactgagtagggcccctctttttttgtaaagtcagccatccaggatctagatgtgcacaggaaatccagcagtgaattcaactggcttcatatttttaaggctgtaagagatataagccaataaatagtcactgttcacaaaggtgtgagactcccattcatgactctcactctagagtttgcacacacattcaatcccctcctaccttccagcacaatttagcctcctataatgtttacagagagaaaatgtcctattggttgtgagcgatggtaaacttcatgatgtgatagaattggtatccttacaactccattgccttctagatccccccacagggaacaattttctcactactgaactatagacaggaaacctgatgtggattgcttcagttccttagtgaatcaagccaccagaggaaaacatagtagaagaagtttgtcttttctaaatcaggcttgcctcaaggaggaaacaggaaagaactgaggtaaacactgcctcccagttttaattctttataagtaaactggtccttggtttaacaattaagaatttcttcattcaagtatatagataaaaaatacattgtggaaataatgaataatttaaactatggttttattgataaagacattagcataggaagtcagcagataccatacagggatcagagtcagttgggaagacatatagaacttctcagaaactgtatttgtgagcatcagacatgctgtacatcaaatatagaaaagtttctaatgtaatctagcgccctttattgtagctagttataacggatcagttctctttctcttctttaatttcactgtggcaacatgctcgagtgaactccgacatggtacatttaaccaatttggcacaatgccttaggtttattaaacaaacagagatttgatgggctgtctctaaactctagccccaaagatatttctgcagctgtaagtactctccctaaggtgatttctcacacagctgttagaactcagcacacgggtaaaagaatgcacacacatcagtatatgtatgattcatgtatgttaactgtaaaataatggacttcttatgcttttttttaggtatttatttcatttacatttccaatgctatcccaaaagtcccccacatgctcccccacccaatcccccacccacccactcccacttcttggccctggcgttcccctgtactgaggcagataaagattgcatgaccaatgggcctctctttccactgatggccaactaggccatcttctgatacatatgcagctagagacacgagctcttttactgggtagttcatattggtgttccacctatagggttgcagatccctttagctccttggttactttctctagctcctccattgggggccctgtgatccatccaatagctgactgtgagcatccacttctgtgtttgctaggccccggcatagtctcacaagagacagctatatctggatcctttcagcaaaatcttgctagtatatgcaatggtgttagtgtttggaagctgattatgggatggatccccggatatcgcagtctctagatggtccatccttttgtctcagctccaaactttgtctctgtaactccttccatgggtgttttgttcccaattctaagaaggggcaaagtgtccacactttggtcttcgttcttcttgagtttcatgtgtttcgcaaattgtatcttatatcttgggtattctaagtttctgggctaatatccacttatcagtgagtacatattgtttgagttcttttgtgattgggttacctcactcagaatgatgccctccaggtccatccaaatgcctaggaatttcataaattcattctttttaatagctgagtagtactccattatgcttttattgcatgtctatgtatactttgatcatacttattcccacatagtcttctcttctactctttgccccatatagagtcctttcacctttgttttaaatgcttggattttgcatgtgagaattgagggatttgccttcctgagtctatctggtccactactacatggctttgttccacagaggtctctccacattttaacctgtgtttgatatcttccctccttgcaacctctacagtcttagcattgggatttggctgcagcattgaaatatttcatatgtgggttattgcctgtccttcactgtagccatcatgacttggattaagtactctgcaaagttagaaataagtaaatgaatttctttattttttccccaatgaataggcaaaattattctccttaatcacatatctagatttttcttctagagtccctgcccagagaggggtacaaataacttcataataaataagctaaaaaaataagtcagtatgcataatacaacatacttaaaatgcaaatgtacattttgaacacctagattgaaaatttaattttgtttctaatgagggattttcagtgttaacaggttagataattgtttacttccaagatccagtctagcagatagtgtctaatttttattatacattttatattataggagaaaatagtctttgaatctatctttctactatgtccaacctagaatcctatatgccaaggaaacaatgtatctccaggcttttgtctttagcaattcacactatgttcatagcagccttatttataatagccagaacctggaaagaacccagatgcccctcaacagaggaatggatacaaaaaatgtggtacatttacacaatggagtactactcagctattaaaaagaatgaatttatgaaattcctaggcaaatggttggacctggagggcatcatcctgagtgaggtaacacaatcacaaaagaactcaaatgatatttactcactgataagtgaatattagcccagaaacttagtatagcgagatataagatacaatttgcaaaacacatgaaactgaagaagaacaaagaccaaagtgtggacactttgccccttcttagtattggaaataatcacccatggaaggagttacagagacaaagtttggagctgagacaaaaggatggaccatctagagactgccatatccagggatccatcccataattagcctccaaacgatgacaccattgcatatactagcaagcgtttgctgaaaggaccctgatatagctgtctcttgtgagactaggccagggcctaacaaacacagaagtggatgctcacagtcagctattggatggatcacagggtccccaatggaggagctagagaaagtatccaaggagctaaagagatctgcaaccctgtaggtgcaacaacattatgaactaaccagtaccccgaagctcttgactctaggtgcatatgtatcaaaagatggcctagtcggccatcactggaaagagaggcccattggacacgcaaactttatatgccccagtacaggggaacgccagggccaaaaaataggaatgggtgggtagggaagtggggggcggtgtgggggacttttgggatagcattggaaaagtaattgaggaaaatatgtaataaaaaatataaaaaattaggaaaaaaaaagaaattcagatgggtccacagcagtatgaggtatctctcatgaggaataaataacatgctggttaaagattgtttatcccttcaacaaggtatgtgtgcaattctctagtagtggggtagctgccagatgtaggtgcaacacaaagtttgattattaaatgaacatgcttttaaaattatgaacatcacatgtcgatttaaaaaaatgaacagaaggcggtacagattacaaaacagttaaaataaaatgaaagacatgagaattgcaccagcaatatttgccgcgcatacctcttataagcaatgttgataatcactaagtgaaacaagcctacataaacattgattcaaacctagtcagaggacttttttctaaaactgagaggagattgtcatagagttttgaagaaacataagctttcaatgtacttttttaaagacttacatttgattacaatgaacagagattatgaagacgaattgaataaacaactgaataaacatgctgtagcctttaatgccttctatctgtagataattattagtggttcctgtaccctcttaacttgttgttgttgttgttgttgttgttgttgttgttgttagtcaaagatgaacatttgacaaaagtagcaaatgaactctttatctataagtcctttggtctttacaatggtctgtagcaaatgacttccaattgtccttatgatgaaatctatgcacagtaagataagccagtctattaaacgcagcagctgtttgacgtatctctgaatccatctcacttggaaaatgcatcctgtccacacaaatagactctatgaagcacagagatgcctggggcactgagggtgtgataagccagtagatgtgatgatcatggcaggctgctctgaggagccctgtgagcacatctgtgtgtttgtatgctgtacttctctaatgtgcctttgtctatggacttctgaaatcacccaggtgtggaagttaggtcaggttcttcctccaagccccatgctcccagaaataagactcagactcaaaatatatttacaaataccttggccatatagcttggctcttctctgactttatctaacttaaaatatcccatctattttagggtacatcctgccacttggctgggtatctgtgttcaggtgctttcaggttttctcctcacatcttcccgggtaaatcttcccacctagctctatcccataattctctcttctcctggatgtcccaccatctattctctgtctaagtcatacataggccatccgatttattattgacaggaaatgccacatccctacagacataagatattctctccacacccagggtcctcctttcaacttctgtgaattcagtccccttctgtctccatagacatggatttcctcatcacattcctatttagtatggttattaaacataaactattgtagattccacagtggataaagaaggaagtgaaggagtcaaacccttgttgcttggcttaccattcacctccttgtgaggctgccacagtgagttagcgctccctccgccatctttgagagaaaagcctttcaactgtactgcattgcatttaaggggcgtggcccaccaggagtgattctctaagcatgtccagccttttctccccagaaagtctcaaggagcataagggaagcaaagcctgacgccttggttctcttctcttggcttcacagagctgatttttcagaacgtactgcctctcctgagccttccatcccaatttactgggacgccttgcgctcaagtaacttatccggagtcacacatgggtggcttaccagaattcatagcccagaactgtcatggtttctaaatcctttattatgaacattataacataccatcctccaggtctcagtattaacatcatgtaaatttattctccagcatgattcattaaaatgaaaatgggccattttctctgattctccaagcacttcagcaggagcgtcacatcctgcatacagatttcgttcctcagaaggagacaagaaaagaagttaaacctttacttgtattggatgatggttcaacctaaaagagctttttcttctattttcactttaaaatatttaaaggagacccaggcaggattaaggttcagagtagctgcagttgtatttttagcatcctataaagcaagacagctataaagtgagggataccatggcagaaatgtgataaacccctccagatagagttaatataaaactaaattttaaaaaatcatggtatgttagatgcacacccacttttaaaaaattcctctatcattattaaacaagcgccaattacaggtgttttctcatttcctgattaaataacacaggcctcccaatgatagcaaccgaacatagcatagcaaggtgcaataagacttggcacaaactctcatatcaaggtgggaagaggcaacccagtaggaggagaaaggtcccgagagaaggaaaaagagtcagagacacatcctctcccactgttaggagtcccagaaaaagcccaagttaaacaagcacagcaggtaagcagaggacctagcatagacccctgcaggctgtggttgccatgttactctctgagctcctgtgagccctgcttagatgatttcctctcccttttctatagggtttcccatgctcagcttaatgtttctctatgggtctctgcatctgctcccatcagctgctgagggaagcctctctgatgactattgtgcctacttgcaaaagtatagaacttcacttatgggtcccagcattgagaaacattttcagggaaattgctgtgtagaaacttatctatggcagagtatcagggttggcatttcatggaatatgttatcatgtgactgtggaataagacatatatcgaaataagtataaagacaggctaacgcatatctcagtgtggggaagaaacgaactgctaatcaagggacaccacagtaaattttactctcatttaaataagatgtttattttaaaataaagcatggactcttgtagatcagggcagaggtatggaatggaatgacagtggacctttatgcaaacactacctgtctcactctcaacattgtagccttacacatgacttgttctgtgtgtgccagtgggatgagcatagctaccacactcacttcttttattaagttgagaaatgtgcaaaattaactaatcaagggactgttgcacagaaggacagcaacagtcaggtaaaataagaacattttgaaactactagggctagtgcctaccatagagaaatcctcgaatgaattagtttcctttattaagcccttatttacatacatatattttatgtttatttactgtctttgtgcatatgtgtacatatgtgtgtgcatgtttgtatatgtatgtgcatgtgtgtgagtgtgagtgtgtgtgtgtgtgtgtgtgtgtgtgtgtgtgtgtgtgtgtgtatgcatgtacacatgccctaaagcagcatgcatggaggtcagaaggcaagaagtttccaccagttattggctcaggtctttaggcttaggagcaaggagctttactctctgagccattttgtaggtctcacacccttgaactctttggttgcttgagttggacctcaagtcaaaattaagttcaataactttacatacaagatagatattgtagattgtggttattcagattttagtagatgaagaacacacaatgaggactctcatgaagcacagtgtattctggattaagggagtgacctgtgatcatgtaatcactcctcatgcttcaaaactgatctctgaatactgcacatggggaatactgcacttgactttgaagtaacttttctccatatgcaagccaacttaatatagcagagaagttcaccccagttcacttcagcaagcatttgtaattgctgagtgtccgaaatggacatttttccttatcaacatctgcattcccctagaagagaatgccgatactgttactgtccatcttgatgtttatatataaagagaaatctttagatttagtaccttttgtagatgtagtccccagccattcctaaagccacatacacagaattgatttcctggtcccggacctctggtcaccatgcaaaataaacttgtagtgtgcttgaaagaaggcaatgatgttaaccactggataaaaaatcaacacgaagcacaaccaattttttcttccttcatatctgtaagatagattcagttgcatgtaaataaattcaatatagactgtatctattagagtattgtgtgcccttaaagaaaaccttctaggggcagatagaaaacagtgcccattgtcaagcctgacaaactgagtatgggcccttagaccccattgtcaagcctgacaaactgagtatggaccctagaccccacactgtggaaatagaaggacattcacatacttgctctggtatgtaactctctcttctcttctcttctcttctcttctcttctcttctcttctcttctcttctctctctctttctctctctctttctctctctctctctctttctctctctctctctgtcgctcatctctctctgtctctcatctctctctctgtctctcatctctctctctgtctcactgtctctgtctctctctcacacatacatacacagagagtctctgtctcatatgcaagagaaagagagagaaattaactttttaaaaaaactttaaataacagcaataacaaaatagaaaactccagtggatttttttcttttttaattggatattttatttatttacatttcaaacgttatcccctttcccggtgattatagtttcctctttctctactcctcctaggtccttcctaccttccatccagacccactctctttctttctttcattaagaaaaaaaaaaaggcttttaagagatagtaaatataatgtaatacaataagataaaacaaaaactaatatatcaaaattcaacaaaacaaacaaacagaagaaaaagatgcccaagagacgacataaaaataagagacaagagacacatttattcacacactcaggaaccctgtgcaaacacacctagaatccatactatatactcaaaggacctggagcagacccaataaggtcctctacatgatacttctatctctgatttttaaattctcccatgaaagaaatcccagtcataagcatgtttcattgaaaaaaatatgagaaaataagtattttctaaatttgttctttgtagaatttcaaggaaaagaggcaacctcaaaacagcacactttcaatttacagtagcctacccttgcttttttaacttttagaagaatatcttaatgctcaggcagtagactctgttttctcagttgtgcttttctatacaacatgccttgagagagcaaacagaaagtgactgcagactgaaagcactgagcttccctgccaggaggtaaggtcaccatcacccagtgcccattggcatttcttttcgcaacagttataactccctgattcttcaaaaagtctagtattctatcactgttaactccgtagacattaaattttagggatgtggatttaataaattgtctcatcctttgtctgattggtttatctttcttaaatgagaattaatatggctagaaagaaatgacttccaccctgtgcctgtttaaagtgaaattcgctattaaaaaaaactcaaactatattaggatgaaaaatgtattatgctctgtgtttccaggcttgataataaagtatgcaagcacctctgctttcagagtcaacttttaggctaaatgacaaagcatcgtgtgttccctgaagatctgcagtaagctttacaccaaactgctactagaaaaacaaaaagatcgcttcactgtttctattatgtatctagattttagatagaccctgctattatatcttaaaataccaactgcaagatgatcttcctttcttcactataacaacaaatttctggtcccaattcagaaacatttcatcttcctaaatacacattcagtaaataagagctttaacatacttctattcggtgagcacgaggaaaaggccgttctttttttaggatttcttagatacttcctgaacttaaacatttgacaaaacattttgtgcactaaaaaggagaagagaagaatttggaagatcctttctgatgtataaaatggagctccagtgattatacattggatttgtcagagagattatggagtttactgaagagtccttactgaagagaaacaagaaagtcaaagtataccaaagtataccatattaaattgctgtattttaaatctgtgaagctgcaatgtaactagaaattccagattattttgattctgctgtggatatatacaatttacaaaagtatccaagagttatgagctatatcagctcctgggtgattaacactaggacaggaggataatcaatttgtcaatatgtggtctaatcaatgccagttaataagttctattcacattcatagtaaacaactggtaaagagtctattgtttatccatttgtgaattttatttctccagtctctactccaccaccattattatcatatgttgttatgaagcaaaagccagctctgagggcaacattaaactcttttataaggacaatttatgccctttatatcatcatgatagtggactttaaacatctttgcatcacactaggcagtaactgtacatgatgtgcacataccaagcatgatctcattgttaagtgataaaaattgagaaatatgttgggtatttataaagctaataaacatgaagaatttaattttgaaacaatgtttgaagtttaaagatacaactatggcaggtaaattctaatttgtaatcttttatttatttgcaatattttaagtacagtctgattctatagaagaatgataaaggggcttagaggatggccttccttatcaagaatcagtccagctatgaaaggcaaatacactgctttgcccccaacatgatcaactcagatccagtattttggttttgcttgtttttggatgctataatgtatgagcttggatatgtctcatgttgctccatgtatggagtactgagtactcttgggaatacatgctgtttaaaatgtacaataacaaatgtatgtttgaaaaatagaagacaagacaagaagaaagtaaacctgggctaggaaagcctagccttccaactataatgcatagttgatacttgtgaaaataatgaagaaaggaagcaggtataagcagagcaaatctgagactgaaatacaagtctagcaatgatcaggtgattgagactccccagagcaaatacccactgggaaaagttcaggttgggcagttgcagacggaccccaatgtctcaccatgctcagcctttgactgtgctaactgagaagattatagtttatgtttgaaagttgacatgagtctaaaggcataggcaggttgaagctctcaaataactgcgtatttgtcaactaaaggacaggttcttgctttagaaagtgagatctgatatggatatctccagtaccaccttactatacaaaaggagagaataggttcttaagagatatggttgatatgtgcataagagatatggttgatatgtgcatttaaaaaaagagtgtggaagataattgatttggtcactgtctgaatcctgctaaactagtcaagaggactgtcaagagttgagcaatctatttcttttgacttggaaaatcatcaatatagcattttttagacctgaacctggtctactttatatataaagtatttacttattatctttatttatatactgacactgaaccaaatatagtttattcaagtgcattacataaaatttcaccaaaacattgagaaagatcaaacgaatgcctttttttccctaagtctacacaaatacttagtaacacacaaaaatcagcagggttaaactatgttaccctcctgatctatgtcaatggcatatcttcaatgcttctccactgccatgtttaacttcttatttctagtgctattgaaatccaacaactggcactaattataaagaaacagcacaaaactgcatttaggaaaaaaaaatcaggagttgtagtacagctcagtggtagagtaactaggcttgttccctagaaagagaagagaacaaaggtgataggaagagtgattcatacccattccctacaagataaaaattggtcatctataccacttgagtgtcctactgtgttaatggcaggattatttcatatgttacacctggtcttgtagcacccctcccccatatgtgttatgttcatctttcccatgatatgttaagcctggaagaatttggtgactactcaacaacaaattaggacaaagatagggtagcacttgtcctgctaagtcccaggacccactacttgtcaatgatagatgaaaattgccttgagatggtcatttcaaagtgattatatctggtacacaagaagataatcaattttagacagacatgctgatttttaatgtctatgtgttttgaaacattgagggggctgatttagtgcaaagtggttaaataatgtaaatggtaaattgttaaaatcacagaagaagtcagaaagacatatttatacataaatgttaattaaagtttatatgtataattcagataaaattcatacatatcttcatgtgtgtatgcatgaatgaacacatgaatgtaatcaaactttaggacacaaacctagacatctgctatctgtactatatctatttagccagtgttatataatctgtatttctcgttcctagcctaattattgcttgatataatgatcagaaattacaagaaaggcatccttggaaggctgataagtcatccagaaaattagattagcatgatcaaactataatggttattgttactcattataatacaccacctgaaaagttgaaggaagagaaataaattggcatcactgagcaattatagtcgtccatggtagattttacagatgatcactagttatgaattcttttcatatccaaaactgaagattttcatacattatagcgccattattacagtaatcaaagcccgtttatttgatcatcatcgtaatggagtacttgaggcattttctcctttgctaattgacagttggtcagttaagaggtgcttttcacagaatctccaataaccctaagggtttgaatgggcttgtaataaatgcctaagacgctcctctagtttcctaagtgcatttgctgcaactcatgacggctattttccatgttctggtcaggaaatgcctttgatctgccatccaactgcctctcgcattgttctctcgatcttgagcattgtaaccctactcatcagaactgtgacacattaccatttagttatcatcttctgacgccagaatcttctttaaaagaaaagaaaatgcagagagcaggaggagggtcaaactgaacctcagattgccttgtttgaagaattgcagtaggtgatgtgtagtcagaataccaaagcttcccacctggttgttgcttccaccttaattgcaaaccgaggtgctttctgtgcagacttttggctcacttccatgatggagcacccaaacccgactccagaatccaacatcaggaatgcaaaggcactcctttcaatgtcattctcccatcattttctaatttggtggtggtagttgaaggagggcacgagaagtgagttgcactaaatcaataaacaagttgtttgttgtaaaagagtatacaatgcataggtttaatatactcaaatgcatttaaaatattttcctactacatataaggtatcttagcagggactttgtcttgcaagtttcttccctttcctagcacctagatgtttggtaaatcttgataaaatgaatggatatgtagagaggtttgggctaactcattggattaatgttctagtatgattccttaatggcattaattttttagttagtaaatatttagagaacgtttttacttgtgtaaactgccataatatcaataaggtaactaattcaaaatcttgcagccagagtggactggaagaaaatctatggggaggctcattggcttcaaagacacaacacaatgcaatgtacacttcataaagaactgtacacaaatagctatattgggagattttcttctttctttttactcagtaatatctactctaagttttgtgtgctatatactatgtggtgctaagacacagtaagatataatagttcttgtccacagataaaccatgaagaggcttattgcccacttccttctgtttgttctttaattccctttggttttctttcctttttacttttattacttctttcctccctttctcatgcaaaaaacgtaaatatcattcttattctctcttacatgactctagttaatttgcaaaagtcagcaactgagagtcttgtcttcagctgatggtagcttcctcactgtgtgttccagtgttcaaaataaatattttgcaattagggtgaaatatgttactgacagcagcagaggctgaaggcttttatttattcagatatccatttatttcccaaatagcaaggtaatggtggatcctctagcttatcacttcttctagatatgcacacataattaaatctcgatgtgcctacattttgctttaatctctcctacaactgcaagtaatgagaggctcttgaatgtgactttagaagataattcttctggaagaagtttttagctactcaatatgaaatgtgtcctattacaaataatacactgcctgaactcctgtgttgacttcatttgaactcatatagctcagcttatatgtggaagaattgggctcctgagcaaagggagcattttgcaatgatgcacagagtttatatattaatagtgctgtagcctaggtatagtaattaacctcagctgataagatatgcatgctaatccagattgtgaatataattgctgctgtagcttttagaaccttggacaaaggaacagaaggtgtccattttaggaatattcatgtgctttttttctaatctcttgtgccccaagtcacagtaatgtagatgctcattatcaagatatttagggagatatatagggatagcaatattcaatcccttgcaatattgtttaaatgtggtttttttctttaagaatttctattttgttaatttattaataagggtaatatgaacaaaatggatactaagacatgtcgcataaaatgatcgtgattaaatattctttccactttgcaggaaggcaaaaatgccaatcctgctatttcttgttttgtcagagactcaagggctgtaaagcaagcgtgtagaactggggcaactcattcatgaatactgttgttcgtgtctgacttacacagcaggtggggaggctgatgggattaactgctgatggaaatatgggttctacgacatctaatacagcagctcacatgtcaggtttggccagtgcaagtcaaaagctagattgttacttgcatgcatcttagttcttgtcagttgtaactaccacatagcaactgccaagcatattagacagcacagacaaaatggacaattttccatctagttttcaaagcgacttgtcttatggtagaaaatagagggctacttttagtcaaatattaaccaataaagatacataactaaatacgtcattactcaatatttatggaatatcctaagatctactcaccaaagttgttttccatgctacattaatagtcttgtaagaaatctagagataaaatccatctatttgtccagcctttactattcctgtctaaaagaactgcagggataaaaatggagaagagactgaaggaaaagccgtccaatgagcagccaaacttgagatccatatcatgggagggccccaaagcctgacactattactgatgctatgctgcttatagatgggagtctggcatggctgtccactgagagatcctaccagcagctaactgagacagaagcagatacttatacttacccagccattgaactgaagtctgggaccccatggttgacttaggggaggaagtgaaggaactgaggggagagtaaccccataggaagaccagcagtttcaacttacccagaccccagggagctcccagagactgagtcaccaaccaggagcatacacaggccagtcacaggcccccagcacaaatatagcagagatctgcctggtcaggtcttaatgggagaagatgcacttaattctctaactgaagccccagagaagagggagatctgggggggggtactctattgggggaaagggggaagagaaatgagatgagaaactgtgcgagaggtgatcaaggtgagagggcaatgaccggaatggaagaaagaggaggggaaggaggaggaggaggaggaggaggaggnnnnnnnnnnnnnnnnnnnnaagaagaagaagaagaagaagaagaagaagaagaagaagaagaagaagaagaagaagaagaatcttcaagaataaagaagaagctaaaacctgtgcaatattagcaggaatacatcaagaacaccttactctattgcatttcatttcattttataaagtttgagttgtagttaatatattatacattgagaagcccattaatcttttgattagcatttgttttcttatgttttcctcagagacaaaccagcaaatgagaaatgttcttaatttgatctctggagtaatcataggtatggatattgtagcgtttaacagatgtgccaaacaaatgagtcggcttttgaatgtacatttctgtgcagcaagaatgcaactgccttctaaactgtgcttgagttcgagggctgaacttaatttctgatctagatgtagtctcctgatcatgtatagtctcaggtttttaaaatagtagttaaaatgaaaggtttttttgtttgtttttttaaaaaatacttcccagctgcatttaaactcatgtgaaacctgcttttcaaaacacactattcaaatgacactatttttttgttcccattcacagagttctcacaatcaacagccatttgcacttggagaccctgggtatagcacattcccttcttcatggacctcttgcaggtgtagctgatgcaaaatagggagtggtctttaaaacttatattatccactaagtagctcctccccaaagggaatcttttctctatttctttgtaccactccatcagtacacaagtaagtccctgacccacatgacccccttcacagtaaagcaaaaatggttctttatttggagttccttgttatactacaacatgtgattaataaccttcttctctgaactgctggccatccagtgtgggagcagtggaggagtgggatgcttgtcagaaaatataacccaagcttctgacatggaatttaaaaaccaggacagaaaacacctcatttgatcatttgactttgttggtggaaggaatctcttgaatggaggttgttatcctcaaaaatgggtacaattcaagaaaaacacgactagtcaccaggtactacctcatgcagtcagttcttttgccccctttactcttccatccaaaaatcgctgcctgcatgcgtgggcccagcctcatcagaccaccacttcagagacacaaaattagagattcaagcatacagacaaatttagttgctgcttattaatacttcacaaggccttaagtatttcatttcattatcattttctttgagtcacactctatatttttcagggaaagaacttcttactcattttatctgatctaaaaatacagatatgcattaagaattccaggcagcattggagatgaaagcaaagcaacagtatgaacgttgtgtggttataaattgggtgaaaaaaacaagggtatgttttgaaatagggaaaaataaacacctttccatttggggatacctggagtcagctaaaatttgatctttatatgaagtctttaaaattgcttaaaacgtgtatgtaactgtagcttccaaaattgtaatgattttaagatttccggtgtactgtggggaaataaaattggcctgttgagtgacacaaaacattattacattctttcatttttggtaattatttaacactattagctatgctgaaagaataaggtcacgcgcactaaatgtctcaacaatatcttcctgggttttccccacaagagtgtcacactccccttagagattccttcacttctacatttgatcctcagacaagagtagaagactttctcctttccatagtgtcactttaaagccactaacaattccatcaaccagtaatctgccatttattcttttttttaaacagactcccatactgtagcccaacaagacttcaaactcaggaggtcctcttagctcagcctccctagtaccagggttacagaccaggaccaccacatctgacacaaagtccttattcacaggtcctcactcatgtaactttttcctatacttgataagctgtcggagttcacatcagtggcgttctgctccatgtgggcatgcagctggctccctttccatattctctccgtaagagttaactctgggagttgaagaaactggggttgctggtgaaactgaagcaagaaaatccagggtatcccagtggctttcaacattttcacctaacactcaagatgtgctagcttatgcacagttgtgggtagcaacattcatccacctgaacttagtggcagagacgtactgtagttcatctcctgctctcattacaagtccactgcagggttcttgtattctaagtcaaaatagttgactttgtcctttgtgatcactcagggatttgaaaagatgtgtcaccaattattgactttatacatgtaaccaacaagttaaaagagctggtcagttctcctcaagtgcttcttttttctattctctgacacaacctcctgctccatccttcttgtttgcctttctcaggtgcccttcacaaaggaaggagtgagtgctttgtagagcctgacacctgcaattgaatgctgcagcccaagtctgacctgtatgactgtacacagaacatttggaaaatgtaatattgagctatatacaggcagttagatgacaacgttagtaatgactactggggtgtcctgttctctcttcttaacactgatctcacactaacacacactcctcattttcaatataaccatttaagtgtgctttgactcaaagttcaaaaattctgaaagtccactctgtgatgcttctactttcagctttgtgttatgacagatgtgagatggaatgaagactatggagaaagagtacttttggccagcatactggagactctaggtttaacacacagcacaacagagatagaaagaagaaggaaatagaagaggggagagacaatagttttgatctttaagatcttttgggacaatgagaagattagataactaatctgaaatctgaaaagataataattactaagaatatagataattggtagaggaagatggataacagatagagggagaggaatgactgagcaattaagagcactaactgctcttgcagaggacacaggcacagttactaacacccacatggctcacaaacatcttatccccaattccagtagatctgatgccttcttccaacattcacaggcatgtacatcgtgcacatacacacatgcaagcaaaacaatattactcataacattaaagaactattttatttaaaaagtagcatagctcaagatacaattattaagagtacaacaccctaacagcaatggatgaagagagagagagagcctatccttactgactgggcagacaactctgaatcagccttacagaaaggagagagctcacatggacagtgatagcaacaggtagacatccttgaggaagagatacacccctcagcagtgtaaataacatgggctagaggtgaggggagagttgttgactggggataagtcatgaaaccttttgtatataagttatttttaagcagcagaggctttgaactcaaatggcttctttcttaactccctggtatttttaagatgtcatttacatttttattgacaatatgtggtattttttaggaatgctttttgctgtctaaactgtgaaaattgtcttaaagttaagcactagttgagctctctaccagtgtgttttattttgctatttactctgtcagtgtagcatacatgttatactaggacaagtgttctgaccaatcaagtgtctgcttcttggatttaacatatacatcagtgtatttttattcactcacaagtataaatcacattttatacctgaaaactttaaaaaatatgtaccttaattctgtcattttaaaacaatcatgagacagacgaactaattgccatatctgtcaagcatgtggctgtaacagctgcattttccccagacttgaaggtatcactttgccaaatgcagctaaaatatggaaaataatatgatttgtcatcttaaagtatgcgtaaatgttcaattttgaagtatctataaattttgacacagaccctgagtgaaagttacttgcttagaaaataccacatttgcaaagctggcctcacaggattataaggaaaacattgttagttttataaactttatcgatttctttttggatgacttgaccacctcatggcaacaagttgccctctaatgttcatcccttttcaatatccagataattttctacaactaattcttttcactttacacctttatactgagctaaggattctgtcaatggtttgaagtcaatcagcttagttaatttgtaacctatactagctctttgaattccacagaccactgtatagattgctttagtttacattttctttgtttttccaggttgtgttagatggtcatgttttctttcatatttcaaataaaataaatctgaccatctgcattataaacttgagaatacattctcttcttgtttgtctcttcatgtgtatgttgatttgaattggtgtatatgagaacttttgccttcagttccagggctgcctcccttggctggttagaaggaggagcagtatcaaagagagacttagcaattctcagaggtaggcccatagtcacactactaagttgtgttcaaggggcaggtgtgaactagaagatgacagacagacgcaagtgactggagccggcagcaaagaagaaattgtaggaagaaagcaagatctcccaacagaaaataagcagaagtcatggatctgtcaactatttaacctcatcataaacactacatcctgcctgcaatgttcctagagtcattttaataaactaaagtaaaataaaataaaataaaataaaataaaataaaataaataacaagggctctgccattaaagcaaaagtggactggaaaatatcgcaggccatttgaaataattgttacagtagctgcaagctttttaaaaagctctgacctctcaaaattgtctttttactattatccttttatttcattggcctacttatctgaataagttatataattaactacgcttttttctttataaattttgtctgaaactctcatcgatgcagaagttagatgatacgattgtcaggcaaccactgaacagtcagcaccagaaagaggatagttctaaaagaagtggagaacgttcttgattccattcttgtcttcatccataacaaaatagaggaatatatccttaatgtaatctttattcccaggtccattgcatgataaagagcttggctttagagggcatctacttccaaacttctccactcgtctgtcctgcccacaggccttgtagttctttcaccaaggagcataatttgattattttcttgtaagaccttctatacaaatttagcatttctattcctctttttgttgtcatattgctttaaaattgtaacttttgtcctcccaaaatgctaagtgaccactataaatgtactcagatgaacatgagagatgctgggccatttgtacttcctccagtaccctcacttggactgagagaatgatattgcttcaccttcaacacctactgaaccttaacaccttgggcgtcagagcaagttagagggtgcgaagcatttgcacgtttctcctatttaatcctcaccccagcctgtgagctacgcaaaacatcacgattctttattacagaaaaatctggggctggagaaataatctctgcactctctcctagtggtaggcctgaatgtagtcaagcaggtagatctgtgtgctgtagatctgattgtcatgatctgagtttcatttcagtgggatacataggctatacatctgataaaggcaagtttgggaataaggagagcagctccatagaaagttatcttaaaattcagggaaaatgatgagatttgacgtatgcagtggtgatggcattgcataataggacacaaacatagcattctacttgattatgaaagctccactaaaatgaaaaataagtaggtaaaagctaatgcagttggcaattagattttatacataaatggaaacttctgtgcattacaaaagatatttatactactaacacaaagcactagactaaaaacatgcaggagtatacttaatcaacatatatctttattcattttatttataaaaattcatcgataaggcaaatttgtagagaagacttagaaagacgttggtcttactttagtcacgaccattgtctggcagtattttacatcttctgtttataactgtatcatgttaactggttgccatgatcgacagagacagaacagataaagttcctatcattcctatcagacaagacctgtttcacctatttatagtggcagttcctcaccacattactaaccttcccctctttctacagaaaaacatgttcctatttctgctaacaacactcaactttgcgctaagccagtctcttttctaggacacacttctataattttgccccattgtctactggcaaaatctgaacttgtctatgctatcattcccctcaattatgaattgatgcctcgtatcacttccacggaaatccatttcttggtctgaaactatctacttcctgtctcattctctgtccacattgttttccactctgtacaacaatagtctcatctacattcactgtttccaccaagtaacttctaggcttgtcacatgtacttctgatcaaaatttggggaccaccgtagcctacggtagcacagacattcataaaatattgaaaaactgaatttctcatctttctaacattcattaaagaaaaattcaaattctttcatatgaatattcataggatggtttgtattaattatgctttgaataataagactatttttgcttataattaccatataattgatatgatatcatttcataaagtttggcatagcaagtagctctgagattcacttagagctgtcagacagacttttacttgcctgttggctttcgttccttcctcctctttcttgatttcatttgtccttctttttgctttttttaagtaattgtccttactgccaacacagatggaactaagttagatcagtcaggcttaaatgatggcagtagaaacatctcaacatggtagctctgtactaatctcctaagttatttttcaatgttttgaagaaaataagttatacgtaattactaaataaacttgtaagttctagcaaactaaaatgttaaaaaaaactaaaatttctgtaatggcatctttagaaaagactaacgtgtgtcttgcacttttcaagttgcgttagaattttaaagcactttgtgtaagtacagttttagccatctttagtttgggatatttaaatcaattaaaattgcatgtgattgtctgtctttgtactaaattatgaatagtacatattcaatggacataacaatatatattttctcctaaagggtaagcacatgatgaggcatgatgtggatacatacaaagcattacattaaattagctctgcaatagtcaatcagagagccactcctcttactctggcacttcaatatgtagcaggctgttatctaagtgatgaatagcctcgcaaagcataaaaagggggaaaatagttccttcttatttacttaaaattcatattgggatttccagagagaactctgaaaatacaaaagatagtagtttgtggctcaaacaatttaaacgcctctcaacctctaggaactgttgacatgtaccatgttaactgttacatataactcactcacatgtgagagacatgtctgagaggaaaactggccagagaatacaaaataagcaagttgtagaaatgaaagaatgagtgaatattttccataactgccttcctgatctataaagggagtctaccttctattggagggtaaattcagtttggcaattttgtgatgaggacatacatatttatagaacttcttccaaaataaaaatcattttttgtaatttagtaacaagatgatggcagttattacaaatacactgaataaaatcatttattaactctttatataggtaaagattttttaaaaaccttcaaagtctatcaagaattactttggaatcaagttcctattgactataaatagaaggagaaaaagcactgttataattgttcaaaactaatcatattagagtttgcatagaatacaactaatattcgatattttcccaggttcataatagttggagtgggcttgaaactggacctgtgggtcacattttcaacctcaaaatctttttttatactatctgataattaaaaggatcatttgacactcaatgcacagaatatttttacttgcctatgtttctgttatttttaatgttgatgctatgcttaatgtaaacaacacatcttatatgtagaacaaaatgctgacctaaagcttcatggagagaaaatggaagctgtacaatgactggcaaagttagtatcatctgggaagaaaatcaaagtgcaacagagcaaacatggtgtaaccattgtagagcatatgctggcaataaagggagacgatgaaagatacaaatacatgctacgagggaggcaagtaggccaagtgttatgtagataaggaaaacaagcagaatctgaggcgtgagaatgcttgtgactttggaatttattaataacaccggccagtgatttattagtctgttttccataggtaaagctacagttacaaatgacttcagaatctcagaagcttgcagtgtctatggcatatttcttccttcattgctgtggtcagctgtggccctggcccatacatcttctcatactggagctggctgaaagaacagcacatattttatcatgtgtcctttatataaacagaaaaagcaagaatgtacaagtgcacatgatggctttctcacagcttcaagccagtgtgttctctgttgctctcacatttcaatgccagctcatgtcagaatgcaaagtgtggcatcatagaaatataagtcagacagccatgacatgaggcatataattctttcattctgaaataagaaagaaataatggatacaaatgatgcaaactgctctggaaatgattttttccaggagtgttttccatgaagaatgtgtactccaggcatatctttaagagttagggcacacctaggtcaaaagtcaaccatttatgaatgatcgacagagcattagtaatgaattatttgtcattttgctagttaaactaacagaaaagagcaggatggccgttaaagtaaatttccatatgttcataatttttatcatgagggtacaaagaaatatgatcataacagtgtaaagcttaggagagaatcattagaagtgtactctcaatgattgctaaaacaaggtgataacataattattaaagatccatattgttatttcagagcaactaccaaagtaataacataaaggaatgcagcttccatcccaagaatcattagatgagataaaataaaacaaagtttataaaattattaattcatcaaaaataaataaacaaatattaaagcacaacatggaaaagagggacaaaatgtcatgatggaaaatatgaaccaaacacaagcatgctttgaaacctagtgtttgtatactagtcattaaggtggaatgagtgactggacactcgtgtttacacaaaattacgcaaactggggtttttttaatgactcaaatatatgttgtttacaagaaatgccttttaataatttttatgaaaaattaaaatcaattcttaaagagagactcttaaacaaactgaaagaaagagattaggtatactaaatttgaaacaaagcaaaagaaatcaggtgataggaatagaaaagtcaggtgactcatgattggagagtcttactacattccagagacatttcagaagattagtcaaaacacaaagaacaagaagcaaccttacagtcaccaatatggatttctgtgttcttctcactagcagataccatagaaaccaaaaccaccacatttatacagacgctgagtaacactatcagtcatgagctacttaacatcagtaagaaattattccccacaagagctacatacattttcgaagaagcaagttgtaattcccaaggtgctacatagaccttgtcttgaactgtaaaacaatatttaataaatttgaaaatattaaataatgtttctattcatgacaaaataaagtattgaattgaattaataaaccaaaaagtaaaacaataaacctttaaagatgcttaaatattggaatcagaaacaaaatagtaagtaatccatgggttacagaagaaacttcaaaggatgcataaaaatggatatttcaagggaaatacagagatgtcaggatgtgtagggaacagttaatgcaacttgtgttgggagattagcctatagtacctctattagaaaataaggtgttaatgaatttgaaacataatgaactacatcctaagaatgtagcacaaaggaaagaataaaagtaaaagcagaactcactaaaatgagagaattatgttccatcatgcaaaaaaaagtcaaatttatgatagaagtcattctagtacatctatactggataataacaagcagtggacaaggcatcctcttcctacacttctgtctcttttcagtgtagactctgtatactcctaaacgaagtatgcagaacactagaaaagaaaattaaagttacaacaaagcatagcaagtacggaaatgctgaacataatagaaaacgaagtccagtaacatattaagaagtcaatatactaaatcaggcttcatttttcccaagagtgtaaggttagtttaacatgtgaaaattaatgcatcttgtcacacttacagatcaagagaaaatcacacttgggggagaaagattctcagtcttcacatgaaacacgaaattcaatttgaggtcgatcaaaaacctgagcttaaaactaaaccttaacatttataaaagcagagaggtaaaacctttgagtagaagtctttctaaacgtgacataaaaataaaagtcatgaaaggaaaaccttggtttcatctaaataaacacttctgctcacatttaaggaaggaaaaaattataagacgtagctgggcaaatgttcatatccaaaatatattaacacatctccaaatttgagaataaaagtaaaacaccatcagccacaatattttacttcgtgacagtaaaacttctactgtgaagttcaagagacttagaaacatatgcatgaaatgctgttcataggaatgctggcgggatggggacagtggctcaggaattaaaccttactttctgggcaagcatgaggacctcagttctaatacccagaacctacatggaagcccagccatccgagtcacagtgcttctgtgtggagatggaaagtggaggcaggagaaatgcctggatgctcaccagccagcatcctgaaccaacagtaggagaaacaaacaaatacaaaggaatcctggctaaaagcagaatgcaaagaccaaaccctcaggctctttaaccacttgcataggcagccatggtacagtgcacacctaaattcacacacagaagtatacacataggcaaacatcatgtagaaacacaaatcatagctaaacctatttataaatgctttttgtcaataaatgtcaaattataatttttatctttttctgtcttcctcccaatgtgccccagtgtgtgtgtgtgtgtgtgtgtgtgtgtgtgtgtgtgtgtttgtagataaaactcatagactcatgcctactaattacatagtctaccactgagctctagagctacactgatgcccagtaatagttaccagttaatagctccaaatgtctacttgtcctctaacaggagaatggatagataagtgtcacatagtatttaaagtaatattaaacttctaagaatgagtataactaatacactccaactacctgactctgaaaatcgtgattaaaagatcatcccagagatggtatgctgtctgtttccattaacatcacattctggaacagttaaaattagactgcagtgacaaagaacagatgcccacctgcccacatatgaacagggcagtggcaggaagtatggtcacagggaagggacataaggaagcttactaagatagtagtagatggctcactatgtctcgatattattcttcaaactcaaaaggttgcctttagatctgactgtgttgctaaatgtcaatttctgctaggttcccaacaaaatgaatattgaaaaactgtttgagtatcctcctccacccccaccccaggttaaaagcattataagtggaggcgtaacagtgagataggcagagaacagggctctgggtccacgtcagtatgtaggagcagtgaaaacacctaattagagccagaacaacgtgaagatgaagtaatgtaactgcccttaggagaagctacgagagcagggagattagaagtggtagatccaatcacttcttatacttttccatttccaaacttccttaaatggaatatgtaggtttccagtcaagaatagtgtatcaaatgctaggtgtcttcaggagctaaacctttcttgtcccttgaattcctttcaaccacttgtaaaaaccctgttctattaaataaaatgattattctactttacagctcaaatagaagagtttaaaatgtaaatgcactgtgaaggtaaaacttaggggaaattttgcatttgttcccatgcaatcattatacggatacaaacaattaagcatttatccttttcattactgtttctagtaatgtaggaagaaggcaaaaaagcaaacagtcccgtgtagtgcacatttactgagcttataacaggtgctaaatcagtggttcgccagcttgtatgtctgtgacctttattaagaattacagttcctgtcccagcctctgtgtaagtacctatgtatgatgagaaaattgttatataatacagcttattcttgctaagtaagacacactgatgttctctagtctagtgtagactgttacaatagctccaggaatattggctctgactcacttacttttgctgcccactgatagcttgtgcattgtgttttgaaatgttgcacggtgctgctctttctcctaaaactgtggtctgtgggacagcttcctcagcaccgtgggctgtaagaaatgaagaacatgaagctgctcctcacacctactgaataagaaagactctgtattttaacagcacctctagatgcccctgtgcatttctggtgccagatgatgaaggtgctttatgctgccgatatcttctgggtgttgtggcagatagaatctaactcagcggtccagcttgggggctttgtttttgttgtttaattgttagaaaggaaatattttctttagttttcttgtggatgactttatgtgttcacattttatttgcctgcatttagagtgctatgtcttactctgaattattcctccctgtgagaaaactgccaaacatggcatttctacccaaaattccctttccatggattatagtgtagcttcaggtaagagtgccatggccagtcttgccgagtcagcaaaatgtgcccccgcatttcttccaggagatacctaagccaggatctcagctgttgaagtcagtggccctgctcctaagtgctttctcccatcattaggcaccttcccttcactgtggtatgtttcctgagtggtgggaagttgtagcctgggagttgctaatcctgctaacactaaaaggctcactcccattagcagcttctgtgttgcattaataataagaaagtaataaagataccagtctcagctctcattctcccctgaggtaaggcctcagcttctctccaatccccatggtccactctaatggccttgctgtactagagtggtagggtagattgatgtatctattgtctttttatcagagttaaattcctttttccccagaagctcagagggaagtttttccctaaaccttgtatgttaaaagcaatagcatcaatacgtttgccatgaaagcgagccatttaattcataacttaaacgcaagttaagactacttctcacactgaaaatagagagatagcattggaacatagcaagaagcacaaaaaacttgattaccttagagtccattcccagatttcttgacagagccataaaatagaactctcccacaggcattctgggccctttgtgtttgattattcatgaaatcatttctcttcacagcaataaactaaaatcaagaaagatagttagttttgtaaatactaaaaaattattaactgccaaagaagaagtgaaaaaatgaggagaaatgatagtatagcaaaagaagtttggacgtaaggggccaagagtgttagtcaattattttttcataagatgttcctgagatctgtgaaggagttaggctacctttctgttgaaatcatgtggtctctggccaaaggtctctttaaaaatcatttggtgtctagagacaatgggaaagtatatgttctgtctgtgaaaactgattgtatttgcactaatcagattgctatattgtttcatttgtaagtaaagctgggttttttttttttcagctttcctgctctcactgagtacacagtagtccatcactgcagaggtgttactcagctttgcagtcaaatcagtagattgttttttctttctttcttacatcattttgtgctgatcttgtgatgctaatttttgatttgtttgattttgccaatttcatatttatactgtcaagcaaaaggaccaatatcaaccagtagctgctttaatattgtaaatacaattttgttcataactcaagataaccatgtaaaaaataaaagttgtggctggagagtggaatcaatagttgagagtcctttctcttttctcaggagaaaatgtctggtggcttaccaataactagctctaggagttctgacaccctcttctggttgctacaggcaccccaactcactacagtgtgtgcacacaaatgcatgcatgtacacacacacacacatacacacacacacacacacacacacacatacacacacaaagacttaaattgaaaattatttaagtgagttccaggataaccaagactattgaaagacacactatcttggaaaaccaaaagtcagaaaatgaaaaaatgcaaaatatttttcataaatatttatagagaccagtgtaaatcccttttaatgaaacaactcttatatttattagccaagcagttttcaaaaccactatatgcactcttgtttgtggctgtgccacatataaaaggacaggggcattcactttgttcccatgagtacacatccacagtgttgttgatgtatcttttaaactgaggaaaaaaggagagaaatgtgccgttttcgtggagtccataacaagcgaacccatctggaagcagcaactgtgacagggaattctcccagcattgttgttaccatgcacacctgtctgcatgcccttcacgtatgatttctgtcccacagtccatgaaggctctggcgagaccagtcagaaggagacatccacctgtgacatttgccagtttggggcagagtgtgatgaagatgctgaggatgtctggtaagaggctactttggtttctcaaaatgatgtcagtgattgagggtgttgttgttgttgttgttgttgttgttgttgtttgttgttgtttgtgttgtggctcagtaactactttttcaaacatcacgttgttagagtttctattttcttctgacttgccaaggcagtaaggagtaagtgctgtagtttcaggagccaggttgtgaggtggttcaggcaagcagatgcttgcataggaaacagaactgtcactgagaaccccaaaatggtcagtcttactggaaagaaagggaaaccatatttatgagaatgtctcttttaaaaattccatcaagaaacaacagataacttctaagtttctttagtttggaataacaaaattaccacatagtgagtatctgaaaatagcagaaattgatgtcaagccctcttgagccttcaaagtccaatatccactctgaagaagacatagcatctgctgagggtctgcctcctaaaggcagtacttgcctctaaagggtgagatacaaagaccaaggggcctctatggtcttcttttatagaaggattaataagttaattaattagtaagtaaataaccaatgaggcttcaggatgcatgacataatcaccttccccaaaccatctcacttatacaattcaatgtgcagaatttagacatttgtgttaagagagtgttcaaaccacagcaattgctatcataaattttaggattgtgagtctgaataactgcagatttaaaagaggacacatgtgcatacacactgacaagctgaaaagacacttcagccaaaacaaaaaccataacaaacaaaaccaaaacacctccaggctgccctcctgcatcaggttttcctttcctctacagaatatcccatttctctaataaagttacatgaacaattgataattttcgttactttgaatggatgtcaagtatttcgctttctatatcacctgcatgcattggtcctgatctgatcatttaacaaagttcattgagttagagcacagacagttggcatgtctggatattgaagaagcaatcagtcttttcctttcactcctcttctcaccataaccactaacaccacatcctcctactcctactccttctcctccttctttccctcctcctcctcctctccctcttcctcttccttttcctcttcctctttctcctccttctctgcctcctcctcttcttcctcctcctctatttctctccctccctctctcctcttccttttctttccttcttctcccatcttctactgtctccctccctttctctctcccattatctttctcttctttgtccttccttccctctcttcttccacccctctttccatcttgctccctcctttctttctctctttcatatctttgctgaaaacagaaaatcattctaatcttcaatatgaaaaactcttcatcaagagctactaatagtcattttgataagcttctgagagtagaaagaatctctttaaggaaagggggcacttctcaaataagaaagaaaatgatacattggcagaaatgaaacacaagacacttatggggcattttaatgtagaatgaggtaaacatttcatctgagtaaactgggacacttacaagtgaacactgccaggaaacagccagacagaataaccatctatccataaaagtagacatcagtagcctttccagatttaccaaacaccttgggttactatacagcagggggtcacatctgtgattcacgcactagctgaggcatcttgaggaaatgtgaagtataatttcttcagagcaccccaggcatcttaatgttgataaatttatagtccaaagggtaagagatcatcagaatttcttttgagattctctaaactttttagtttcaccctaaacttaatgaatcaaaatttcagtgaagtggaacttaaacttagtctttttctgaaacttcttaaatgattatggaaatgctgctttaaaagaaatgactgactaaaggaatcattggcttcatttctactttcccatcagtcttcaggttgtcaatcattttcctttataaatgggtgtacatggtggggggtggctgaaacatagctcagccattaagaacatgtatttcttttgcagagacttttaaaaaaaaactttctttccaatttctcacctttatactgatcagttttaactgacagttagttacactttcaaagtacataatttaaaatatgaactatataaatgtagctcaagcattttttgcaagactagttgcaacagaaaggctaagcagttgtccatggggtcctagcatgacaaattgacttcagaaatagccttgttatgaaagagacagaaatggtcatggcagagtctccagaaattgcgcatcaagcaggaggattaattaggtactaaacgaggtttacttagtggtcctgccatgaatggccaagccttggtgaccatagatagaaggaatatagcttaaatatggattcttccaaggtcaagaagaaatcagtgggaaagatgactggatattagatcggttatcttttggctagggtatcttgtatgccccagcctagggacaaaatcagttccaagattcagaataatcctgaacctccagatggggactaagtggccatagctgtgaagattagagacggtgggggcagggagccaagaacatcattatacttcccagacaagagtgaaagttgttaatgctgaaagagaatgtgtttaaaatgtccaaggtaagcaataaagagcggtgctgacaccagtacattgattttcatttacttaaatacctttgtgtgttaacatattttatttttttgaccatgaagtagattggaaacagctgaaggacatgagaataaagcaataaatgaagctaaataggcatggaatgagagagactataaaggaagatagttagcactcggggagtgatctgaccgtagtgttctatagaatcctcatgacaacaggagagttttgacgctattaatttggggtgaaactatgactggatccctttcaaacataaaatttttcttgggtcgtttggcaataaagaacacagcacatttttctttgacatcaactaaagagcagtttcatgcatacaaatgtcgtccctcttggctttatgaaataacaactagagataaataaatactagtgacaaatgccattacacaggaaagtatgaaatttattctgatctttctttaagcctggcctaggatatgaatgttttcattctgctatggggttaagcctagttcctcaaagctctttcaaaaggaagataaatattttgctagcattaaaaagctagtgaagagtcagctgatcacactccattgttaggggaggttttgagttaaggaccaaagcacactgcaaatgagccaacaaaatttttaaaatggtaaaagagctggatacaggaacagaaataagnnnnnnnnnnnnnnnnnnnnnnnnnnnnnnnnnnnnnnnnnnnnnnnnnnnnnnnnnnnnnnnnnnnnnnnnnnnnnnnnnnnnnnnnnnnnnnnnnnnnnnnnnnnnnnnnnnnnnnnnnnnnnnnnnnnnnnnnnnnnnnnnnnnnnnnnnnnnnnnnnnnnnnnnnnnnnnnnnnnnnnnnnnnnnnnnnnnnnnnnnnnnnnnnnnnnnnnnnnnnnnnnnnnnnnnnnnnnnnnnnnnnnnnnnnnnnnnnnnnnnnnnnnnnnnnnnnnnnnnnnnnnnnnnnnnnnnnnnnnnnnnnnnnnnnnnnnnnnnnnnnnnnnnnnnnnnnnnnnnnnnnnnnnnnnnnnnnnnnnnnnnnnnnnnnnnnnnnnnnnnnnnnnnnnnnnnnnnnnnnnnnnnnnnnnnnnnnnnnnnnnnnnnnnnnnnnnnnnnnnnnnnnnnnnnnnnnnnnnnnnnnnnnnnnnnnnnnnnnnnnnnnnnnnnnnnnnnnnnnnnnnnnnnnnnnnnnnnnnnnnnnnnnnnnnnnnnnnnnnnnnnnnnnnnnnnnnnnnnnnnnnnnnnnnnnnnnnnnnnnnnnnnnnnnnnnnnnnnnnnnnnnnnnnctaggatatgaatgttttcattctgctatggggttaagcctagttcctcaaagctctttcaaaaggaagataaatattttgctagcattaaaaagctagtgaagagtcagctgatcacactccattgttaggggaggttttgagttaaggaccaaagcacactgcaaatgagccaacaaaatttttaaaatggtaaaagagctggatacaggaacagaaataagagttagaaagtgatgttgataggctgcgacactaatcacgtgatgcttaacacgtgttctgagggaaaagattgattataatctgatggaagatgaagtgccatgttctgtggcttcattatgagactctttttcctaccctattcttgtgaaaatatcaagactgcaaaaactagaaaatgatgcttccccatatgaaagccagactttgctgaaagagtgtcttcagctctgggtatttacttctgtgtaaaaatggatctgactttcaaaaggcagaattaaaattgaagcaagagaaactgtccacattgcagggtagcctctgctggatgagagctattctttattaaagactgacttcaaaacagtagaagccctgggatgaagaaaggaacatttgtgcttgttcatgggtggagttaaagggaggaaaacaggaagtacttagaagattattctctttacaactacactggaaaaaaatcaaaacttacacatcaaaatgaatctcaaatacatcctgccaaatgtaatttatacagaaaaagaatggcttctaaataagagaaaactgactcactgcaaagtaatagaaccccagctgatagcactgggaataagaacttatgatttcagcaaataattttgatagttgcttcattttagacactgctttatattcctttaattatcgtacctgataaattatcttcagtgagtccaaagtaggtcactaggaaccccatgcactgggaactagttcttagaagtaattagcctggaattttttttttcgttggtcctgtcagtcaaaagtagttcagagcccaggggttgatacttgatttaatgtattttttaaaagcaagttgatagctgggcctgatcataggaatgtctgggtatgaaattggctgagtgcctaatatttccagagtgtcagaatagatcacgaatgagagctcaggtgttagaagcaggtgcagccactgacaaacaacataaggggagaacctcgattgttatatgggggtgctttatgtgactgatttaagttcctcatgctgctctaactttgcttttgtaatgtgtgctatgtgccatgcagctatcattggcaattttacataggctcaaatgctgttaatttctcagtgtccacgccttcgcctctgaaagcaccaacagggcttaccagtcctgaaacgctatcccatgtggatataaaatactggtgacagattgcaggggtaaggaatgacagagaagcagcagccccagtatcctgagttcacaagagtgagcacatagtgctttttgttttgctgtttcactgatgttctgtaattggagcagggtgtacaatttggcattcctttcatgagcgtctctcacaaagacagtttagtctgaagtctttagcatcttgctcctttgatccgaggagactcctcgtcactaggaagaccatgcactgttggcatcactccctcctttaatgcattctggaccgtggagactcatgaatatttgaaacagggcaatggccgtggatgatccttggcactggagttcaccatacgtataagtaaattagacattcgatcccgctgacttcagtgcattctggttgtaaatttgagagggtaaattaagacaactctgagtaaacacagaaaatggcttcttttaaaactactactggccaacattgaatagaccccgctgccacaagctggatatctctgggtgaaaattttcaaatagggttgaaaacatgcttattaatcgtaattttatgataaactgagtttatccatacttcacctaagtggttcttttttatcaacttccttggtgctgtggcctcacaatggtaaatgtggttaaaccccaattagaattgctttctatcatgaatttactcatgaagacaatgggtaaaatcgaacacactcacacaaaagaatatcataggtccaggttagaaaatctactgtttgttgtattgttgtttgaatgcatcttgccatactggccataattttagctcaaaaggttcacaggtaggtaaggctatcgttaggctgagtagcacttcctagtgccgtgaaaactagccagaacgaagaaaacttcctgttaagtaccaccttgattcttttaagtcctgtgaccagaagagtgtaatagcttcagcaatagtgtttaaccaccgacttctggtagtcactcaagagcaatgttaatagcctgtattattttgggggtctttcggacacttctgaccaagaagttgggggaggtatcccatatgtgacactgggctttttactggacaatccatggcttctgtggggtgggtatcatcccaatttgtggagccttttgtaaagtaagattccatatggctttttcaaatttctttagtagtgattaacgctcatccccactctgagccaccttctcatccctccccctgcctagcccacctcatatctctcctttatgtcacctgcattctaccttccttcctccaataacctcttccttcctactccccgcctcattaacttcttcctgctctcctggattctatgcacactacatattcaacatacaaatataaagatttgatgctgtttccacacaagagtgagaacatgtgacatttgtctttctgggtctccggtcaccttatttactactcaataacatgtgctgttttcatgtcctggctataatgatgagcatgagtgagcatgagcagtagcggtgtatacacatatgaatgacatagcttggtcatacagggggtcaatttctagttcttttgagaaactgtcacaatggtttctagagtgactgtctgagattctcatggtctaggtaacactcctcttcctttgcttctcattctgaaggtaaaatgaataactgtcaactctaaaagttgcaaatgtttctattcatatagaagggggaagacatgatctttcctttagtatttcctggcctggaaagcttttaagggagtgagaaatcagtgcgtgattttaaaaagtattgctccactcccgtgactccacatggaaaatgattgtgtttattagcaaaggaagagctgcatgtaaatatttgagttttattattttttatgcatttctattcttttctatatcaagaatgataaggcctgcctctaaggttcacataattaagtaaaatttacaagtacaattattaccatattagatcagtatttcttgggcatagtcagtatggtggtgtctacaaattgttgtttaatactttgtgtcaacaaatcccctatgtatgacccacacattctactgcatatgctgcaagtagcctaactttaactgaagctaaaagatccaaaggtcacttaggaaaataacttagtaaagacagttcaaagtcacttaaaagccaattgctgccccaccctcccaaaggaaattatattttatgaagttacctaaaattttgaaattgaaccaatgtctagcacctacatatcctcattcaaaaggctttttacttaagttttggagtttcttgatattttcccaggttccatatccaattctgccagatatcacagtgcttaacaaacttaattgcaactgtggatctagagaagagtggtggattgtcaagctccacctgcacttacctgtgttcccagtatttattctggcgacgtaataccaatcatacaacttctactataacgtaaaataaagaacttataaataacaaaacaaaggaaacaaaattctaaacacagagtgtacagtcctatattaatttaaccatttccattcttcttactggtgtcaaaagactcactgtagactgatcctgatgtgatattaattttaatatcagtgaaattgtaataatgtaatattgtctagcctttggtacacactgaacaaatccctcacactttattcctttcagagtttgggggttgctgattttctcagccttgggtataaaaataggcatctcattttattcttcagtatagacagaagtttcccaaatgtgtctcctgggtgctaagacactatcctaaatatttagatttatggagtcttttaacttgcacaccactcatatgaatttcaatgcaccaataattcttacttcattttttaagaaaagggaactgtagctcacacagagaagaaaataaaacttgccaaaacccccaaacaggaggaaaaacttgattcaagccagcaagactaactgtagagatatcttgatgttcactgcttctcaaaatgtcttagtacttactgtattcagtgataaaaatgagtatatacatgactacatacacagatatataccatgagtacctccatttgtatcatgtacttagcatagtgtttcacgcttcgggataaaatgcagtaacaaattgtatgcatctctaacgataaaagccccagttaacatacccataatgactatgctacactgaagttaaaggtttataaacattatttctcctcatttttcctcaacattgtgggaatttcatcagtttgatttttggtaagtatattaaattttttatggaaagccagtgtcttcactgtgcctgtttgtgtgtgtttaaatggggtaactagcgtgaaagtttaaagagacatttttgccatagccttccttttgaacatacttttagtcagttggtttgtgtttcagtgccagacactggagtaccatactcaggaatgtttcccaaggctaggcaaaaagtggggtgaggagaaattcagagacaaaattaaactttgtttttcgctgcccgggagaaagatcatggactatctacaccttcccaagatatattatcctatattataccatattatataccaaattataggtgtctatttttcccatggtaaaatatttatgatgataaataagaaaaaaagaagaaaaataaagaagccaacgtatttaatagaaaataaatatagacaaatcatggctttggtcaccacatgcatgtctctcaatttagacttaagctgtgacataaagtctcacaatttcctatttaacataccattttgatagtaatattacagatttagcaatgattttggacaaatataaatgtaagcaccatagtaatgggacatctttgtcaaggtagctactaaaatttcaagctatattttctttccatggatctatatgctttgtaaaaggaaaaaaatctaaacacattaggtacattaacccagggaccgcttttcaaaatttttatttagtcatgaaactgaggatactttttagagggtggcagtgatttttttttttaggaaagctgaacacatgatagcattttaattggagctgaattattttcaataacccagttctgatttttctcttaaaattttcaactctcaagacaaaattgattcaaagattttggcctaggagccaaaatattgtcaatgtagacaaatttgttgtacttctacaagaaaagagagtttgtgtgcagaaacttttctactgtctgtgttcagagagtctataagtagtagttttctgaggagttggcattgtttcctgagaagccgtctgcccaatggtgtattaaagtgtgtaaaaactatccctagtcttcagtggttgattccaaatagtgatgtatatgttggctcatttaagcaacaaatcagtgagctatcttcagcacctcatgtccacttattacagatatttttcccatgagtatctactaacttgctgaacaaattacaaaattgcatgcaacgctcaacagaaaaaccaatactggggatggctcagtcagtaaagtgtgtcttgtgcaaagacctgagttcagattctcacatccatgtaaaagcctagcaacaggagactactgtgagaaagttaacgttggagagtctccagagttcacttgccctccagtctaactgatgagcgctaagttcagaaagggaccatgtctcagaaaataagatggagaacaattgaagaggacatactcttcaattcactaagctatgaaagagaggaagaaataagaatgatgcacttgggacaaatgatcttctgtggattatttaccatagtgctcttctttttcactacagttcttttagtgcctttaacagtacataccattctctacgttcatctctccaacgaaagttgttttgaaggtaataataaaggaatattagggtagaactagccataaaggcttacttattgtcactaaatactgaaggaagtacacctgagaagagtatacaatactagataaaggtaaagtgaaaaacatagctttacactaaaaaatatcgacatatttccattaaaactatagacctctgcataaatgtataattataggacagtcaaatacaacattcaggtatctcttagaatacaaaaataaaaatagtatatttaccagcactatgccattgagttctgactgactgatttactcacaccagaaagtaggctgatttgggggggaaagaacgtacaagagaactatttgccttgcatcaatttgggtgttcaaatttggggattaaaaagaaatgcaggaagaggaaaagccctgaactaattaacatatcagcataatagtcataattcttcagagaaatacaatcactacaaagattgatggatcaataaatgataccgtagactaatgaattgccatataggtagataagcaagtagataaaggggttaattataaatatatatatatatatatatatatatatatatatatatatataattattccaagaccaagcagttgaaaaccctgagaccatggagaaagtatggtattactctgtttttaaaaacataatgagaaaataatcatgagagctacatccttatttctgtgagtttcgttcagttataaccatttccttccgctaggctttctttaacttaaggaagtatctagctaggtaagcattctttgtccataaggtaaccaaacctttcctagaggatattaatcattggcccttttgcctagacggaggttgtgctatttcattgactttaattttagagtgtggaagttaccaagagatcactgaaggctctcctgttcctccagtttatagtagtaaaccactttacccctgagtgccaggcagcattgcctcagaggcatgagaccaatgagaccaggcaatgataataacttaccattccatcagtcagcattgtgccttttgtacattctttcttttgtaagtgacatctctgggtcatcagagcacaagaaaaggctttggccctgccatcatggaaccaattatgcacacatatttagatttccaaagcatttctcactgtaagctctgtatcacagtagcatccaccagagaacatgctaggaggcaagtggtctactacataattttttaatcaatatgtgtactataccaaaagtgaggagtcttaaagggcaaatgtactctagtgttgccatctctgcaatctttgaaactccatggttaaaatggcctttctaacctactgtgaaacattttttgacctgtttcaaccaagtacacagtgaggtaggtcactttctagctgtctgtgctacaacctacatgaagtgtaactttatgcttagtgtggccaactaataatttcaacctaatccaacagtttatcccttctttccaccattatcctgttctttcataccccccttccattcccaagcatcttctctagatttttatctaagctaaaagctcagagttttttcagagtgtagcatagctcctcacagatcatattgtatagctcacttttaggagctcaaagaccctaagtacaaatatttgactaggggtgtattagttacttttctggtagctatgtaaatagtacccaacaaaaacagctaagcaaaggtaaggtgtattgggctcagatgacaatgccctgagaacagttctaaccttgtggtagaagtgtgtaacaaatgctcacacggcatcaccataaaggaaatgtgatgaaagttgatgttcacatcattttctcctttggtaaatgcctttttaaattttttgagattataatatatttacatcatttcctaacctgagactacaacccaaatgatggtgccaagctctctggaaacagcctctgaaagacacggtgttactatctttggctactttgtggttctcctttcttccacccttctacatcctgtttcttccacactttcaacccccctcacactagataagagagaaatggggataagaggaaagggaacaatgttatcattagactaagtccagctagtgagaagcatcaagttccttggggcatctttgatcttcaccatcagcctaactataattttttttcttccttctcctcttcctccttcttctccttcttcttcttagtgaatgaatacttgacacaccatgacaaataagaaacaacaacagctaacagcaaacaagtaataaccaaaaatacaccctgcctcttgggaccctagcatttatatatcctctgaagagtacccagaattccaaatgtcacccaattgcagaaacaatctgcacctggcaaaatcacaccaccactagagcatgaagcaaaccatactgagctactgtgagcaatctgaagcagccccatatcccatacctgggattaaaatgaaaccatactcataatatttacatgctttttaagactttatcttatgtgtatgagtacactatagttgtcttcacacacaccagaagaggacatcagacccaactacaaatggttgtgagccaccatgtgcttgctgggaattgaactcaggacctctggaagagctcttaactgctgaaccatctctccagcccacacatttttttaaggaaaccaaaaccccaaaattgtcactaaaattcaactactgacaaaatttattctcttcttcatttcctcctaaattttcctcctccagcattagactccacatgcatctttcacacatgttgcccgtctcttgtagcacattacagcaaaagggtgattcttccctcattgaatttccccaccccacatgctcttcttcttgaaaattcaacctgatatgccgagctttatttgcatactttccttttatgtcagtgttttatgtctatacttagactaccgataacaataggtaaactgcaggaaatcagtaatggtctacgtaatttctatgggttctttgaatcctaccactaccacaacaaacttggatttttagtgcactgtaagcatttcctccaaggcaacaagttcattgttcctctttcctatggggtctaaaatttccaacaattccttcctaaattatagaagaggggatattgttttcgagaacacagcacatcctgctctgttttttaaccatacattagtagaaataaaatgttgattaggtagtcgtccctttagaaagcataggaaacaggaggctcttgacagcatttaaagtgggcactttagaaaggtaaacatataatgaagctctttaaatgagaggacatttttgagatgaataacaaaacaatgctgcagggaaggagcaaggtgaaaggcaagaaagaaagtaattataagaaaaatctatggccagagaagctattacaattagtcataaaatttatctgagtgccctgcattaaagttaaagaagaaaagaaacaattctcccactataattagaaaagatgaagaaatttgtcaagacactttatccagtccagagctccacaacaatttctattgtgtgcacttactagaattttgactgaaatgaaaaaaacacaatcaatgattgagtatcaaaagcttataaacactggaaattcgtgtattagctatagccctgtaaggttatgaagtgtcactctgtggaggttattcctgaaagatctggatgtgacccttgctatatttacataactcagttcaggattaaaacaagtggaataggtagacagtgtacatcttcattagccttaatggtgttctcagaaattagaaatcagacatatctgcgtctttatagttgtgagacctatgaatacaaaacactttctagaagataaactgtgaggcaaactagacaagaagctcaggtcctgagatgttcttagagtagtaggcccaaatattctgtgctctattccaaaccatttgtggaaagctcaggagttacatgactttatctatgacaataaataccatttatttatatagttttggttacaaatattttattttattaatgactaagaaaaatgatataacaatttaagtttcaggagaggtgaaaactttggtctaaccttcaccacaaagactcagaaggatttcacaaatgtagacaaaaaaaaaagtcaattgttgagaaaaccagaaatgaatatatgacattctttttcaaattgaatctttccaaaagaagatgaattgggtattatattcatccatttatgaaaaaagtgaattcatagtttagaaaggcacatctgtgcaactatatgttttttcacaagatcaaatatgagttcaacctcagctttttatgaataaaaagctcatgtcctttaaatttcataatgctatcatgtagatatgaaggtagaatttggattgtaggactgtcttttcagaaaacagagtagtttatggtgcttgaaaagttaggaaagtacatgtagtcaaatgacagaaacagttttccaatgactctatcctttatagagtttgtatcctaagagagaaatgtacaataaagacaggagcaagccatatgctctcagataataggtgtattcaaaagcaacaactgttctgaagagctggattgtgttagagaatgtgctatatactatttatagaacacttttgtgaggacttatcattaatcaattcaggtaagtattgtgaaatgctttaatgggtaagcactacattctaagagctataaccacacacacatgcacatgtacatgtgcacacatgcatgcacacagttttgttcataattcagggcaaatatgcctacttagcatgagcttgctttttcttgatcactggagtctcattcattcatttaatagagagaagatgaaaaagaatggccctagatggaattttataaggttgtctttgaagtggcactccaaatttttgctcatattccgctggctataatattcattatatagtaaaagtgtcattaagaagaaagaactcagtaatgaggtttagcaatgctgcctgaaagaagtattagatttctgtcctgtgaggaggcattacatagcccatatgatgagccaggtgttatacacagcataggcaacacactttcctttaaagaactttcattctaagatagaaaggtccaagaagtggacaataaagaaatggacaaacaacatgctcattggtaataggcattatcaaaagcaatggctgctctggagttaaactgtggtagagaaggtgctagctagcatttatcggctgcttctgtaagggctgtcatttagaaggtagaaggtgttataattacttgtcctactactgtgataaaataccccacaaaaacaacttaacagagaaagttatttttgttttgtttgggtttgattttagttcacaacacaaggataaagtccatcgttgtggagaattcctggtggcagttttgaggcagatgaccacagtctgtgaagcaggaaatgtcacatgccaacattcagctagcttttcctttttatgcagtactggaccaaagcctggggaatagtgctgcccacagtgaggatgggacctcatatatcaattaaccaaagcaacacaatccctgacaggcatgcctgtaggataaatacatagatagatgtacctggaggcctgtctcccaatttatttcagaccctgtcacgtaggcaattaacactaatcatgacaaacggaatgtgagagtcagctatgagaagatctgtaaaaaacatttttctgcccaagacaactcctagtccaaaggcacaagagtgagcataagattgataccaggagaatcaagaaactgaccaaagctcagtgtgtcctctacccagatatggtggaagagggtctaagattgaaggtaaggggtgactcatgaagcatatagttcatcttcataaagaagttcaatgtatggatagtgaaaaaccccagattctttctttttgaatgatatgattagacaattcctactcccacttttttctggcatcttccaatgcatccctaaataccattaacaaccccttttctcaaataccaggcaatgctttctcttgagtcagtcacaccaacatttattcctctcactgtggatatgggaccccttagctggagcacaatgtcctgaagagtagagacatctaatttgtcacttccttggtaacaagtgcagttccaagaaaacacttagctcctggctgggcacataataagtaagtgttaataaataattggatgataaaaaaacaatcaaaggaatagagagcagcatgactttgtatctacctctcgtccaggccttcacgtttctgccatcagatccacacagcatatgggattcatggggaagagtgtagaatctacaccactgtgagaagcaagagattagagagtcaatcaaagagatacaaaaatgcccttgctgagcactgggaagtataatgggacaactgtcaaatcatcagggatgaggtgggagagtcaatttggaatggaagagggagctggtgagagaaacgtttgttctgagtcaactgatgaaaagcagaagcaagtggaatgcccagtaggcaaataattaaaggttaagttgtgtgatacagacagaaaggtctgcaggagttcaggaaaatctaataaagaaaatagatttgaggagagaagtaggaatagacactgaggtagcaagaaagaaagaaagaaaatagacttctgggtaaaatctactaaaaataatgggataatacaaagaatggacacatgaattatacattataatacttgaatatgccgggcgtggtggcacactcctttaatcccagcactcaggaggcagaggcaggcggatttctgagttcaaggccagcctggtctacaaagtgagttccaggacagtcaggactatacagagaaacactgtctcaaaaacaaacaaacaaacaaacaaacaaaaaatacttgaatatattaagatgaaaatactagaaatgagccaatgagcaaaagcagtgggtgctgccagcttccatttacttgagctttgctgttgaacttctctggatcctcacaggcagacaagagacccaattctatggcctattccccttgtggatgggatccctcagctagtctaggtcaagactgtgatgtgtgactatctgattgtaaatgctggactcctcggactcttattttcctcatcctgaaacagtcaccactagtgctgcagtaggtggcttctccatcaccccggaacaagagctaggtcgtggctatcttaagacactgtggtgctagaattgcttattgactgacagctgtcatcaccggagaggaaggaaggacaggtgtgaggtttgtttcacacctgcaatagaagaaaatggaaaatgtgaagatctttagagatggagaacacgtgaagttagcaaatgatgatgatcatctcacaacactcttattcaagcaggcttttcagtggaatggagcctggaagcttcactgcaggggtgctggcctgcagatctacaggtcatctggtacaaagctgggcaagctccttccttctagaaggctggtgggttcctcagatggaccagctgcctttctcttccttccccctccacacagtttacacaaactggtttgattgccgggggataagaattggatggagactggcctttccagatctctagtgacataatgccggagacaggacactaaaaataaacaaatgatcccagcccaaagcaaaagtaggacaacaatttaccaacatgagagaacaaatgcttgatagagttctgacaagaaggatgtatttaggaagataaaacctggcttacaagaatgaagcagaaattgattttccatatggggcctaccaatgtggagattagcacaaagaaaaagaggactaaaaaggcgacgagtccacttcttgttccaacaatctgcccatgtccatggctccctccctgtcgggaattatgagaaggaaaaaatgagaaacacaaaaagaaagggtctatttttgagctctctttacacatgtagaaacctaattttaaaattcttgtgtttgggggcaggtgtgcttccacacatctctaatcctaggactagaagggaaaaggcaggaaaatctgtgagttcaaggccaaccagggctccctcaggagactttatcataaaaaaaataaataaaaggctttttcatgtgtgttacttaaagttgtatttgagataattatttcagtaattgaaattttgtttctttgtccatttttaaaatattttataaagcttttgggaatttcctacagtatgctttgaccatattgctgaaggtaccatatatattagtcatagagaatggaaaattcaaattggttctgcccaggaagcttgctccctgctagctagatttcatggtatgggaagattctatgcagacctctgtgggcagaaaggaagaaagacagtagtcttatccagctggaaaccctgggaactaccgtaatgaccaacacgggaaagatcacccatgggtacaatagtggcagaaatgttacatgatggcaactgcttactgatatatgtacatcttgccaagagtccaccgttaagggactcacagtgaaactatactacttggctaaatggacatcatatcaaaactgccctctaaattcatatggtaatgtttaaatataaaatgtactcaccaatgctttgacctgaaagtattaattgtgcggttttttttcttcttctttattattgaaagaagaggcccaatgcagtaaaagtaaattttcttagcaaccttctgtcagaagaagagaaatcttcacacctcagacaaaggcactcccagggtgtatactcgagttttgatggagctgcatataaatcacaggaacacaatgatcactctgagtcagagtttaaatctgccacttctgtctttctttatccactaaccatgaatccagagctcctgttggctgtatttcatagagacagagatgcttgaatcgccaaatggatgaagcaaaggtcacacaagtggttgcatggttagatccatccaacaaagtatcctggtgtcctgagagcacagactttgcgtcagctctcaacaaaggctcctgtgtttttaacagctgcttaattaagcacttagctacagattgtcatgccttatatttggtgctgctgtttgctcctgtgtacttgggaataaattcttcaccattgttgcatctcaaagtttttcatctataggaagagaattgggagacctgttttctaaggttattagaatcatgtgtatgtgtgtgtatgtatacatatacatatttatgtatatatatatatgtgtgtgtgcatatatatatgtatgtatatatacatatatatgtatatatacatacatataatgtacaccattaccattaacctgatttcttagaatttttttctctttaaatttgtattgtgaattctcagaatactgactttgtgctgcagtcttttcctttcttttcctgtggtgcatataagggaaggaggagtgtcacacatgccaggcaagcacacgtgctgctgctcagttttcggtcaacttgacacatcaacctacctgagaacttaaaatgtagaattacctccatcagattggccagtgggcatgtctacagggaattaattattgatgtgggaggatctagcctactttgcacagtgccacctctgggcaggtacatggtcctggaatatataaaaaaaaagcaagctaagcatgcttccagttataggccaggaagcaaatcccccctcccccacccccatggcctgtgcttagtccctgtctccaggatcctgtcttgagctccgggcctggattctcttgaagatgaactgcaaccccttcctccccaagttgaacagaaacggaacaagaatagcatcctactgctgctggcatctctgaggataagttcattattcagactatgatttggattagtgtttttttttcattcctcacactgcacgatagagtcatcgctcatcacagaaatgcttcatacatctccaatacaaccatttaaataggtcttgaatcatagcacttgagaaaaatgaaaacattccaaccaattgattggaattgttaaactgatgactacaattttgaggatttttttaatatatatatatcaagtgatgatggcagtattgtatagactgttcaaaacaagaaaaatcacaaccttctgaagtcttagaataattattgttgttgttagagaaaagggcctttaagataaataactttcatattacagataggatttatttactactaaagtggaccacacaagaatccagctctctcattgagcaaggtagggtttcgagaacccctagctatctcagaccatggatcctcttgcatggctgatgagttgggggacagaaacctttagaaaacatttggatccagaaaccagactcctcaccatctccctaagttgcttctcaaaacatgataatgtcttatgcctggctgcgtgggactttagagatcttacactgactttcaccagtctgcattactattcataaatgtgaagcagaggacagttaaatagtctgctcaaggttctacacttccatatttctctcaacatcatagctcactcttgttgagattcacatctagggtttatacagaataatgaggaagtcctgacattttttaattgaaggcctgataaaagaatcaatttgatcttgaatttttatctcatgtctaggagtgaaagaaaaaaaaatggcataagccgaaagagtccttatctttactgttcttgtcttaccgtgaaagaagaaaaccatcccttaggctgaaactgttttaaatagaccatggtcatttactttgtaaaaagcatctttgaagctttaagggaagaaagatggcctggctgacctaactcattgaactttaacttacatccgatctatgacttcaagaggagtactgcctcccccgactagtgtcatatatcctgtaaaaaccactgaggttccaggtagggctgacaatgccctgtcgtttccacagagcagataaatttatttttaaccgtcaaagttctcattgcttgattttcccagtctaaagtgcatatattatcagaatgacccaatttcaaagccaagaattgtttttcttgaaacaattattagcatttttttttactttttataaagtcaaaaaccaagaacatatctgaatcacttttcttgaaagtgtgtaccatgtctgagcacaatttttaattgcatctattagacagaggctccctccctaaaactgcaaagagctgaacttacattttcactaattttgtgttcttgatttcctagcatctctgaatttaagttccaatggctgtaaaaaaaaaatggagagagagcaggacctacccatagaactgttaggagctggattccataccacacataaaatatgcagggcagtctttggtgctcagtacatttctgatgttatgtttgtaaatttggtatttcattatgatacatctgtctatccccaaaacttgagtttttcacctgtactcatatgacagacagatgatctcacagcctgattctccctgagcaataatccattctcttaacacttatccaccgagaatctaagaggtggccattacctcaggcagtggagttacagaagtgaatgaaactgatttaaatgttatagaactaagtttactttatattagaaaatacaataaataaatagatgtatgtagttcaatagagataatcgcttaagtaaaatttaatgtggaaatggcatacttgagcttaacatagaagatttttaaagaagtaggtcatagacaattttaggaaggatgacacaagaaaaatgttctaagaagacaaaatttttaataaagctgcagaagaccatgagggagacagaccacttgctatgcttcacttccttccaaaagtaactgaacagaatccagcattcggctaaaagcaggagcactggggacaaaagtggcttttgaattaatatcagataataactgcccaatccaattctctagtgaataaacaattgtaagtgtatgcaagtgtttaagagaaaggtatttttctttcaatgttgtgtttctcatccatttgtcatccagactctttccttttcaggccctagatcagttgatcttaacgtgtagtccagggaccaagatactatttgactttttcattctcacacaaatgcacagtagttctccaaaggctacttgatatgttttattcagcagattcaatgcaaaagacggtattagtgtccagttttcttcttttaaggcaaacattaaagggattattttaaagaatgtacatattgccattcttttcaccaaagttatttttagaaaatgtttccatttttgctaaaatacggtatatatcaacacatagtgaaatattactgtatccaaatgaaattaaatattgaaaaattccaatgcctgttttagttttacatttggtaaatattgaaacatgtaacctacttaactagaagctccttgtggtcttcactgtatttaggatcctaaagggatcttgtaaacaaacagttggaggagtgcagtgcaggctgatccttcctcagtgtctcttacattaggaacacttcctacatggttacaataaagccctccgtttagtgactcttcctcaattcaatgaatacaactctgccaggtttccattgctgcataacaatcatccaacaactaagcagtttaaaaggcagaaggttgataagtgtgaataccaagaaataaaataaaaaccccaggagtttttaacactagtttgcctagttttcttcagtggtctctctctctctctctctctctctctctctctctctctctctctctctctctctctctcctctttctctgtctctgtgtgtgtgtgcacgtgcgtgcacgtgtcccctccctcctccttccccttctctttctcttcattctctccctgctcttctcaagggctagggtaaggcaagaaggaaatcctctatgccccacattcctgacctagaaaaactctgaagaaacaaactacctttatactatgatgtgcaaaatctgcctaatctttcctcttttgtctttacaataatttgcataacaagtagttggtcaattcagagaagtagtaatacatgcaaaccataaggtccgtctgtcatttgcatttcttaggacatggctttatgtgtttctaagtatcctctggtttgaacagaataggcctcttgaagctgacagcattcctatgtaattgactgtagaataatccacttacctcatatttgttttgagtatcaacaaactcctatgactgtgagagctgctggaactctctgtgcttgaaaagtctggcaagtacctctggatatatctgcacagtcatactcgcaatccaccttttcacttgaagttacttacaaaacttgaagatagtaattaagaattccaaatggatggtaaaatagacagctcatgcatgcacaggtcccatgtctctgggaagcttgtcctgtccatcaattttactgtagtaaaagtgttcctaggactagctccacactaaaggtgatggaactatagaagagaaacaataccaagaagcaaaggtaattgataccaccacttatttacatctggaacttactccttttcccttgtaataaatgataggtaggtaggtaggtaggccggcaggtaggtagttaggaaggagatagataggtaggtaggtagttagttagatagatagatagatagatagatagatagatagataggtgtattttttttttctgttccagatttttgtttgttggtttctgtgatgaaacactttgtccaaaacaacttggggaggaaagggttaattccatctcacatctctaagtgacagaccaccattaaaaattcaggacagggattcaagggaggaacctgaaggcaggagtaatggaggcttgttccagtgactgttcagctgccttatatagcgctgatgttggtgctgacaatgaatggactggaccctcctacatcaactagcaatcaagaaaatattccacagatatagccacaggccaatctattgtttgagttatggttcctttccagacttagttgacagtcaagattagccatcacaattcacattattttgtagactaaatctccaaaaggattatagttccctgatatataacctgacattcccttgctgcatatagtatgctactaataatttgcactaagtgtacacttctctataataaataaattaattattcaatggaactttgattttaattttagttttgtaaaaataaaacttatgtggtgtggcctttatattttcatcaaatgttgcaaaattaagacagactgactttatctttccagagccagtcctctccattagccagactcactaatttcccccaatttttatgttctgtgtggtcatgtactgccctccctataaacaccagttccttctgaattcttcaaataccttacttgggttattgtcatgagtgaactatcgtatgtgagaagattagtgagatgggacagctgaggcatgtctggagaaagcactccactggcgtttatgtttggggtgggttcggaggagggttctgtttttctatggcaaggttggaggactatgcccgtttaatgggttgtgcatgtggtcatgcattgtgtgcacaaatagtgctgcacagtagtcacatttagatttcagaaaaagaaataaaaacatgagcaggagtctttgtagatctaagtgttttttgcattggtctctctacaatacataagctttcacttccagatctgtttcaggggtcctttataaatgacagaaattgaatctttgtttccaaggagcagaatacaaaatgcatcagtgtgccatttaagggaaactattttgtcagccttgtttatgcactcaatataatagtgttttaaagaaggctagacccagtctctgcctgtttatgcaatataaacagaagcatcccttttaacgtcctaaaagcaggatgtgtgctaatttcaccaagtaaaagccactgcacctgcccatgtaaatccttgtctgaagcaacctcgctgcctcacaatagtgtgaaagtacacataaaagataatacggcaatgctcatcaaatattaatgtgcattgacacatagtcatctattaccgcagtacagtccccacactgagctgctctaggttgcaccctccttcacctttgtctttacccctgggtttgcctcctcctcccaggcaaagcaaagctttgttcctccccctccacttcctgaccaagtccagcagcagacccactggtgtcctcatggtggcctatttagttccagtaaaatatctattgggctaatgtgcgatcaagagaggactggcatttattgtttggagttcatgatactgtgagctgagcaacactgagagccagccaagggctctgagtaacagggagctggaagttcacgagccatgtttgtatttatttctttaccaattgcttaccagcatttcagcaataaagccattatgtttccccatgctttatgtaagaatgtctgactagccaaatgacagttcaactgcagtttaaaaataaatgtgttggttaaatagttcagctgggaatgtatttttctctttgtgctcagatacaaaagcagttgttcagtgactgagccatgcatgcagacattgtacctccctgtggcttgtctctaccatgcaagccaggactcatcccatgtccggcccaatttcagagtaatggccacacctacaggaaggaaggaaggaaggaagaaagcacaaagaatctgtttacacaattccaagtcatccaaatcaaaaaggtatgccaaaattcagtgtcttgcttccagatagaatctttcattgctgtggcacaaatctcttctcatcaggaggggaacaaaaagcaagacctgaattttgtaactgtgatgacatgctgaggcttttcttattgttacatagggggtgaaaagttcctacccttcatagctcttgccaaatgaaagtttccctaactccttggatttaaattggactgttttccatgtctttctgttgagcatgtttaaaagcaactgtgttattttttttaatttttttattaggtattttcctcgtttacattttcaatnnnnnnnnnnnnnnnnnnnnnnnnnnnnnnnnnnnnnnnnnnnnnnnnnnnnnnnnnnnnnnnnnnnnnnnnnnnnnnnnnnntacccaccccccaactccctacccacccactccccctttttggccctggcattcccctgtactggggcatctaaagttggcaagtccaatgggcctctctttgcagtgatggccgactaggccatcttttgatgcatatgcagctagagacaagagctctggggtactggttagttcatattgttgttccacctatagggttgcagttccctttagctccttgggtaatatctctagctcctgcattttaaaaaacagaaaaagaagaaaaaaaaaagcttttctctgtgctgaacttttgcctcagataagtccttacccagcacagacttagccaggaacttcacactcggttgtaggcgcatccctcatctcctgatcaataattcaaatgctcaatagaaatgccttaaattgaaattgaacataccattaagagtcctcgaaaggtgggtatcattcattcaaaacagccatcggcactccacagtcaccaaagcacccaatatagctagaaatctggatttctcgctgacagccaaggcatttcctctatatcaattatttagtcttgagtgagtaaacttctgatcgccttcctttgtctgggtatccatctgtttctctgagacaagagtagcacactcattcatttctgcgttgtccaggcctctgcttttcattaatctttttccagccatccagccatctctgagccctgtggttataagaaattatccatgcaatgaacttaattttaaaaattctgcttcataaagaggtgacagaattctcagagcccagtctccttccactggtggccactgatggagaaagagatgctgattggaaaatggtgttgcagaaatcactggaaaagagataaggaaagcatagaatagtcccaaaattaagtgattaaacaggtaaaactctttcatccatcttccttatcctacaaaacacaggcatgaaacctcaactacctatgctcaagttacagtggacatcttaaatttaatgaatttaatatttgatctacaaacctagaatcagtcaattttgctttaaaatcacgatgagtaaataaatacatgaagttaagttctaattctaattttgaattttattttacagtaactgtttggaaatttccgtctgtaatgttctctgccacagctcttcagtgcatgatgtggacagaatatttttttttcctgtttaatttggtaaatttcacaacttcattctgaggttgtttgtctaaaagcaaaagcccaccatgtacaagacaaaataatggaaacaaagtactgaagggcagtcctgagtgcttcaaagactacagtcgcctgctatttaagctgaagtaatgtgctggcttaatactgcatctgttgacttaatgcagcttgtagtaaaaatgaagagcagaaagtatccataaaatataatccacttcagtatttatgataaatcaattatggaaaaccctatgtatgggaaatgcattctaaatcatttcatgaataaagaaatacagcaattttgtgctttaaaaataataaatctgtacaccagagatttgtaactgtcacaaagtctatccaagtggatcatggtttcaacccaatcctcctcccacacagcattctttgttctttcacgggatttcaaaggaaagactttattgagtgttaatctttttcaatgtgcctttattcactttggatatcatgtgattatgcttaatcagtaggagtcattcagtcttcttctagatcctacaaacacagcatatcccaaacttagatactctaatgctaatagagtagaatcacgaaaaaaaatataaagtacttagaagaaacacctcacaggtaaacataattactagctaccagatctaacagaattattctaataacaagaaatttatatgagtagatgacagataaatgacacagagatagatagatagtagatagcaaatagatagatagataatagataatagatatagataatagatatataaatagatatagatagatgatagatatgatagatatagatatgactgtaatgatcatacatacatacatacatacgtatgtacaaacttttaaaaaataccaaaagttgaggatattttactggccaatgaaactaggttttaaaatgcagtcaaaaccccctaatttttgacagaaacaatgactgatcatccctagattcaccaaattttgaaaaacataaagacaaccctagtcagaaaattgtacataccttgttgagagatcaaatctgctttaaaaatagttggaatgctcaaaatgcaaacagacacatttctaaaactactactaggcaagaagtgggaaatatctgttgttgacatagttccaacaagaaaggaaaaaggctatgaacagagagacagaaaacatacagccctggattgggatattttcgcagcagtggacttttgcatagtcagatgggaatgctggtcatgtgagatcaaaccttcagccctagatattagaggaagaatttgtcattttatctatctctactttagacatgaaaatggaatatgtacaatatgcaagtaaagaggaagccacataaatcaaaatatacatcctgatttaggttaggtgaaactcgctcaaaagtgagtaaacaaacacgccaaactgaacacttcctggcatcttttctattgcccaaacttaataacatgtgtagagccaatagactgcttcatgtgactcactagatgacatatctcatagtatttctttaatatgatattattttaagtatttggtatagccctgaaaatagtagatatcagtaaataatattattactgataactaattagcattaatggggtaatttgaaaactatgaccctatataatgaaaagaaaagactcccattcaaaatcagtaagtaaacatgtctggtccaagacaaatctcaggaaacattttgttatcgtagagaaagaggatgaaaaaacactgacaaacatctcagtacagaaacatcaactactctcagaagggccgcatcctaacagaaccactgatgtgaatgtttccaaaatggaagtctcttaataacaaatctggggactggtgaaacaggatgctgcctctatacctgctgttcattctggagtagttacagggcatcaaataagtagtctggaatcaggcaagtaagacagcgaggataaactggaactctctcaaggataaactgaccatgcaaggatggaatggagcaccatatgtctctcattatctcctgcctcagtgagcaacatgacctgtataaaaaagcagctcctatttcaatgggacagcatacccacctggatactggctcagggtctctgatggaggaaatctcctgggaacttgagatgcctgaaccaagcttcttccctgtggccatggagaggcactagcagtcacaatagccatgtgacctggggctcctgcgcaaccctccataaacttgctgctggctgttgcttgacttccagacagttcttgagtccatctccagcccaggtccagatccataaaggtggggcctgtagaacaatcataattgggcctgggtatctacaaaagaacaaaatgaaaatgtccaggattctcttctcttctaatacctacatgatgatgagaataaagtactcatggcattttttttttcaaaaactgaatctttcctatgaaggaattattaagttttcatatgaaggacttcgttcctgtttgggtatttatgtagtttctgaaggccccagacctcttcacctcactaagattctgattctttaggctggtatacgtccactagctgcatgttctctataaatccctctccacaggtcgaaaggtacacctgtgctggcacatcagcgtgcagaggatgtcccctatggccacacatcatactttaacaaacttcatcaactttatctttgtatcttcttccatttcgggtctagtcatactcatcaacagtggtctcccctatgccacagttctttccatctggggcataggaataccccagtcttggtacctaaagggattgtctacaagtctttcaagccatttttgttaacaaaatcccaactcttttgtctaactggctcttaggtcacagcttgtgcttgctgtgttttttatctggtttctaaacatttttctctcaacaacagttaacatactcatcccccaaggtataggcactttatgcaggtagatagatagatagatagatagatagatagatagatagatagacagatagatagacagacagacacgtgtatatatatgagtatgtatgtgagtgtatgtgtgtgtctgagtttatatatacatatatgtgtatatatgtgaataagtaataagtatagagtatatgtatgtacgtctttggcttttgtttgccaggtacccaacttattaacttcatctattagttaaataattatttttaaaaaaaatagttcagtcccttttttatgaagatgcatgtcacacacagtcaagatatatcttgtttctggagctaaaaccatccagtggaagaaagacagcattttcaacaattggtgctggcacaactggttgttatcatgtagaagaatgcgaatcgatccatacttatctccttgtactaaggtcaaatctaagtggatcaaggaacttcacataaaaccagagacactgaaacttatagaggagaaagtggggaaaagccttgaagatatgggcacaggggaaaaattcctgaacagaacagcaatggcttgtgctgtaagatcgagaatcgacaaatgggacctaatgaaactccaaagtttctgcaaggcaaaagacaccatcaataagaacaaaaagaccaccaacagattgggaaaggatctttacctatcctaaatcagataggggactaatatccaacatatataaagaactcaagaaggtggacttcagaaaatcaaataaccccattaaaaaatggggctcagaactgaacaaagaattctcacctgaggaataccgaatggcagagaagcacttgaaaaaatgttcaacatccttaatcatcagggaaatgcaaatcaaaacaaccctgagattccacctcacaccagtcagaatggctaagatcaaaaattcaggtgacagcagatgctggcgaggatgtggagaaagaggaacactcccccattgttggtgggagtgcaggcttgtacaaccactctggaaatcagtctggcggttcctcagaaaactggacatagtactaccggaggatccagcaatacctctcctgggcatatatccagaagatgccccaacaggtaagaaggacacatgctccactatgttcatagcagccttatttataatagccagaagctggaaagaacctagatgcccctcaacagaggaatggatacagaaaatgtggtacatctacacaatggagtactactcagctattaaaaagaatgaatttatgaaattcctagccaaatggatggacctggagggcatcatcctgagtgaggtaacacattcacaaagaaactcacacaatatgtattcactgataagtggatattagccccaaacctaggatacccaagatataagatataatttgctaaacacatgaaactcaaggagaatgaagactgaagtgtggacactatgcccctccttagatttgggaacaaaacacccatggaaggagttacagagacggagtttggagctgagatgaaaggatggaccatgtagagactgccatagccagggatccaccccataatcagcatccaaacgctgacaccattgcatacactagcaagattttattgaaaggacgcagatgtagctgtctcttgtgagactatgccggggcccagcaaacacagaagtggatgctcacagtcagctaatggatggatcatagggctcccaatggaggagctagagaaagtagccaaggagctaaagggatctgcaaccctataggtggaacaacattatgagctaaccagtaccccggagctcttgactctagctgcatatatatcaaaagatggcctagtcggccatcactggaaagagaggcccattggacttgcaaactttatatgccccagtacaggggaataccagggccaaaaagggtgagtgggtgggcaggggagtgggggtgggtggatatgggggacttttggtatagcattggaaatgtaaatgagttaaatacctaataaaaaatggaaaaaaaaaaaaaaaagatatatcttgtttctaaaataattaaagaaaatggtgtataaatcatttcatatgggtactacttggttttattttgtttctttgttttgttttggtttggtttttggtttttggttttttgagacagggtttctctatatagctctggctgtcctggaactcacttttgtagaccatgctagcctcgaactcagaaatccgcttgcctctgcctcctgagtgctgggattaaaggcgtgtgccaccacaccggcttatatgggtactacttgtactgcagtcacttatttgtgtcacctttcttttgagtgtcgtaggtcactgtgtataagtggttgtctccaaggtccagtctgggaagcaaaatacaaattctgtatgtattttttctacatagtaagttattttaaaaaaaaattaccaagacattcatagccctccagacaaactgcctcagctggtcttccagaaacatcacacccctgtgctgctattttgcaggcattaaggggctccaggggaagaagaaggcctcttcctccataaacagcccctgtgggtaaaacctcagacactttcatgtaatcctctgcagcacactgggaaatgcagctggggaaacagacttaccgcttattgctgatcatctcaggaagcatgggtgtgagagaccctcctaagagctctgaaatctgtttcagaatgtcacgtggtttcctgttttcacctctggcttttcctggatgctctcatttttcttaatctttcaaattcttttgtttcctttattaatctctgctcctctttaaaggagggccgagttctggaagcttctgtaagtcttgcctttctttgataccaggcttcagcctatttttttctgtgagccctggggtcaggactccctagatatggcttgcagacagagagcagttgtgccatcccaagaatagcattcctgtgagcacattaaaagcgagagaatgcatggagaggctgtgtcacttgaagattgggtaaaatgaatcttccagcttttaaaaatgcccagtgtttagaaaaattgttttttacagaaagtgtagttgagtgttagacatttgagaggtcactttaaaatggaactaaagttacaagataaagcaagacatttattttgcactttaagcgttggcacacaatttaatacgctgttgagagtacagggatggttgcaagtcaaatgaaggttatattataattgatactttgaattgttaaggagaagcgaaggtgaagtgggatgcttttattattatttttgttgaaatcttattaaaaactcttaatggaatgcaaactagaggccatcttcaaggtccccagttaaattagatatgcagccattaatagtatcacttacttgttgaaaataactctgccaaggcagacatgggataatgtattttctcacttctttgtgtaccttaccatatttcttaaacctggagaatataagcctggccgtcagattttttttcccagttttatttttaaaattcttgctatttatattcagaaacataaactagtaagcaatagcattttatttcaatgtttttcagttgggtttatgtacctacacacttgaaaactataatattattaaaattttatataaaaaattaaattaaaagaattaagaggaaatatggctgcagaaataggattgttcacatatagtgatgagagtgtgcatctgagagctgtcatgacaaggtttgcctcatagggtgtgtcctctgggctccttcattttgtcatccttcctagtatatgtcagtagacaaactgaagaaatgacagaaaaagaagcttgaaattcaaggaatactgtatttttcctaacttgtttttaatcagagtttagaaaaatctgttattattttatttttagcaacagagcatcttggttgagctcctgacagaacagtttcctagaagcagaatgtaaaacctactatttcagtgtgcagttgctcagacacacttccaaagagaacactctcgggaagatcaaggaaaatagtataattatcacaaatctttttcataatatagaatgcacaggcctttaaaataattctcattatgcacaaccagttctccatgtggtattctgatcatctggagtttgcaccatattatattatttaattaacctatctgtcctgttgaatcgccacccagcagccccatagtaccttcttatctcaggggagaaaaccgcacacactttaatataggtgcagcatcatgaaaaaccaggccaaagcacaagcaccctgaggcagaaatgaacaaagccaacactttaaactgtggtgtctggaacctgctatgatcatcactgcagaggaaggaagcaattcggaaaacaaattttcaaagctatttttataccgacattcattattttttctaaatgcacacccattctggtactgttggtttttccttccttaagctcagaattaagtcaaagttaatttcctgctatccagtatgttttttgtgttaacataaattgtttagccaaaaccaaatgagaatgcctattcatttgtgtgtgtgaggacactatgggccaaagggataaataaattctgtacagcttatttaagtggcaatgggcctgataggactaacagtcattctactgttaagagtgaacagtttattaacagcttgcatgttttgccagttgcaaaagtaaacattttaaaagtgacactacatacaatttctctttctctaaagctgtcactttccgtacgacaattgatagaatggcaaccctctgagtaatgtttagggacattataagttatggtcatctaatgatgagcagaaaatatcccgtgaatatatacatactttggcttcattcactttgtttatattatcaattcaagagatacaaaaccgtttcaaagaaggttttgttttgccttctaaacatagtatgtgtttgtaaactgttctgctgtgtaatatcattgataatattgtagttaggataagtcaatttgattatataaatataacgaaataattaaaagatttatcctggctatttcattaagattatgaaactacctagagaaaatatcatgagtggccacagagcaccatctgtgtataatcatgagcaatgcacttctgccaatccatgcatgaatttcacacccttctctttgggatgcttaaatacacttctctccctgtgagtgtggtggctcggagctttacacttacattattgagaaattgggggggactccacaggagaagtaaagaaagggaaaaccaagtctagcaccattggtagctgactttcagctgccatgaccagcaacaggaggccagtttaccgggacaaagctaatcaagttcccctttaaacaataattgaggatgataaaaggagatagagaaagacaagtacacaagattaaatgttcccagatgacagtgaataaagaaaaacatttgcaaggcaagaccgaggggaagaagagtcaggaaagagttatttacagcacatacagataaagagaaacagtataataggaaggaactagatgcaaagggaaaatgttgatccactttaactttttgctgagtaaaacttctgacatggttatgtaaaatattccctactggccatcttggatgatttttgccaattaggaaaaaaaatgtgtttagttgtctaagaataaaaaatcttagaatcttagagaaacggaaactaatttactgaggcttgcatttttacagactttgatagaacttatcctcacagaatcagagtaaaatccctgctcccacttgtgccctgctttgagtaaataagccagaggccatcttcatcagagactcttaggtagcagagaagaaagtgagaccagagaggtgagaggctgtgttaggcttgagagaaggaccatgttgcttttgaagttaatagtctcagtcctttccatccactcctgactgatggcatttcataaccagaaagatgtctctgcctgtcactttctgaatccattcttcaaaaccttgtgcacctttagatgatggtccaaaacctgcatcccgatctgtctccacccattacggcagccctactgcagtcctttccaagaactgcactgagtcacctatagctccatggtgaaagcttcaggcttctactcttgggcactagcatgctctactagctagaagatatgtcatcattttatgttcaactaagacctactcaggattcaactaaacaaagccttatatttgcctccaaaatactattttccctctcttcctagctgtacagtagtgttactcaactttattttaaaaacagataccatatattagatcttaagaaatgtctgaatgaatgaaaatacaaaaatatatatcgttgtaattttcatttgttatatgtctaccctgcttcctcattacctaattagaaaatgcaacatttgataaaacttaggaaaacccagtttaccatgtttgtctcactgcagttgaagtgtgtgtcttttgggctttgattctcatcctctgtctgatacagagaaaggctgaatttttcctcaggtcttctagtaagttgttactaaaagcacgtgactgaagaaagccatgggggagagatcctaggttcatttatttgctcagtggggagaggggcttgctatgacccagagtaagtaatactatttacagttcaggtttcagttggtgaaacataggactaaaatggtattagtcattggagtgtgttgtgcagatggtgaaaagtctggggcagccagtggttgaactgtatgatacaaaaagatctcaatgtaaatgaccctcaccaatcttacctaattatgaattgttaatgaaaaagggcagacatatatttaccagttaatgtgactattttagtgcagcttcttatgtccttatatttattgtttatttcaaacaaatttagcagaattaagctaatctgtaagattctgtcatctgtgatccatgcacaagttctctatttcacttttgttattgttgttgttgtacatgttagtgttgattatatagtattgattatacatgttagtgggactcaatatattcctctctcttgatcctttcacactcctactgacctgattcctatttctaactagtcccttccactatagatccaatgaaatccccatcaaaatcccaacacaagtcttcaaagacattgaaagagcaattctcaaattcatctggaaaggaaaaaaaaaaaagaaacagaagagcaaaaacaattcttaacaataaaataacttctgggggaatcaccatccctgagttcaaactatactacagagcaataatgattaaaaactgcatggtattggtacagagacagacacattgaccaatgaaaaagaattgaagacccagaaataaaacgacacatgtatggtcacttaatttttcacaaagaccccaaaaatatacaatgggacaaaagaaagcatcttcaataaatggtgctggtctaactggctgtctgtatgtagaataatgaaaatagacccataattgtcaccttgtacaaacctcaagtccaagtgggtcaaggacctcaacatcaaaccagatacactgaatataatagaagagaacgtgggaaagagccttgaacccattggcataggcagaaatttcctaaacagagttccaatggcacaagttctaagatcaagaattgataagtggtacttcatgaaactggaaagcttctgtaaggcaaaggacatagtcaataagacaaatcagtaacctacagattgggaaaaagtcttcactaacctcatatccaatagacggctaatatccaaaatctataaagaactgcctatggattcttataaaagagtagggccttataactcacttccctctccaagactgaatgtccatagtctcaatcatattaatcactgtatctgtgagttcctgacggaagtagccaagtcatgaccagaagacaacagtccacctcaccctgcccgtaaatcctttctaccactcttctacagtgtttcctgaacttcggctggaatctgatagatgccccaggtatggttgaacacttagcagtcacttattctcagtatcttagcaaaccacaagtctccacaattattgtgacccactgcaaaacaaaatttctctgaccaaaactttcagcagtaaaaatctataaggataaacatccttgtttagatggcaattttataggtacatcatgttcttttagaaaaacaaacaacaaaccaaagcatctatattttcatactagagtctacgacctccccgggcatgggcttttgactaggtttactgtactagacatgagttctctcctatcaggtgagccttagttccaaccagaaagtgattggttactccgataatacttgctaccattgcattggtgggcatatcttgccttgccgaccagcaatgtaacacacagggttaacattattaaaactgttgatgacaatttctctaaataaaaccaaattctctcatgtggtaaggtctttagcttcaaaaattataacatcatcatcctccaattaaggccatctttagaacttataaagtgaataactttctgtaaggcttgcatgtgcatatatcagttgacctctgtggactccatgtatcagttcacccctgcatagaacctttattggtcatattcatactaaatgtctcttgtgaaaccttccactaactatgacttgtaaacctacacttcagttagctgaagctaccaccgcttgaactatggcattgctttactgtatagtgagatgcagcaaccttaagtgatgctggtactcactgttcttgggcaaaaagcagctgggctctcactgcttaactcagagctctgactccactctcttgagtatagcaggtacaatggtgagtgccgtctgctggcaaggagccgtcctctatgtgccactctttttgaatgtttaatatcagtgtttccattatacacattattctgtaaaacagcacgactgcatttatatttagtagggatttctttaatatgagtccttcaaactggattatgtttagcagtcttgagtttacaactatttaaagccattatcacaactgtgatcagtctttggactttaatatataatatgtatatctattatactattactatatacatatataatctgagcattttaagtcacatcttaggcttgaatcacacaatattttaaatctgaatatggagtctatatccaaatgggtcatgatagagtgagcatttaaagcctgtattaagcatctaaatccttttcagccatgcaaaaatcttcaaagacagcatctataaaggcattgaaccatttaatgtccttctgcagtagaaatacaccattgaaaaaccacacatactgtttttaggtcttatatgtatatattttaatggatataagttcaaaatatagcccagtgtgtaatattaactctagctagccttagcagcatgctatgtgatgtggtccagtgtgaatgggaggacgatagcaatgctggtgctaacagctcttactgagtgaaaagcagcactgagggcctgccactcactgcattcttgactgtgtgtgctgcagagccactcactgcattcttgactgtgtgtgtgtgctgcagagccactcactgcattcttgactgtgtgtgctgcagagccactcactgcattcttgactgtgtgtgctgcagagccactcactgcattcttgactgtgtgtgctgcagagccactcactgcattcttgactgtgtgtgctgcagagccactcactgcattcttgactgtgtgtgtgtgctgcagagccactcactgcattcttgactgtgtgtgtgtgctgcagagccactcactgcattcttgactgtgtgtgctacagagccactcactgcattcttgactgtgtgtgctgcagagccactcactgcattcttgactgtgtgtgctgcagagcatacattctcttgacagtttccagacacacagtcaacatgcaaataatgcctgtgaaatgcggggttttcacttcaaagtgtctttttcaatatttaacaaacctttatctgcaattcattatttagtaatagttgtgtaggatatgagcaataaattggtgaacattccccctgttctatgtaaatatttgaacccacgtaaagtcctgtcaaccaaatcaagcctgagtttattcagcgttcagtagctatttgtaaatctctgaaatgaaatggatctactgatataaatataaatttaaccaaccaaagcaaattagtgaaatcagacacatacaaagtagcctggagataaagaaagtgctgaccagtcaagggttagagcagacagtccttcagtccttccctcctgacatacatactttgctggatagctgatctcaagagagaagcaacaaagttagaacaaactatgtaaatgttaaaagaagcaaggcttgttgagattttattcagaataagaaggttcaaacagaaccttaactattctgaacataatagtaaaaccacagcaactacaaaactataattgtataatacaaatattaatgtgagaatatacagagagagtctgcagttaggagcatagacagagcttgccaagaaggcctgcttcctggtcagaaggtcagtttccagcacttaccataggggattataactgcctgaaactctaggttcattgggtcggatgtcctcttctggccaccatagccacctgcactcacggctatctgcactcatgttcatagctcaaacatgatcaacacccatatggaaaggcaagtaaaagttaaatctaaaataaaagattaattaaaaggctaattacttgtgctttattcagaatagagctcttagagtgtggaatatctttcccattcacaatagttaatgaacatcaatccttaggacacaaatttcatcattatatttaatctaacccatttcacctaatacagagagtttgatctggtctgctgattgtgcaccaaaatatctaatagcttatacatgtagacactctatttattaaaaaaatcacttcacatccattatgagctaagtatttaacaaaaattaatgaatatttattatgtgtatgaagaaacacttttcttgataactgaagcaaagaaacatgcattgatctaattaactatataattcaaattaaaattttatgtctatcagcgaaagctaagcaggttttcaagttggaaatgtgatctttatttactcatgtatttggcaaatgtttacgtttctattgtgtacccagcatttttcttggcgtgaaaagtgcaacagtgagcaaggcagacaagtcattctctactcataatatctatctgatgagataagagaaatcaaaggaaggtcaaatacgtgatacaatagcagggtgcttagacaaatatggtggtgagcaaggtagtccagggaaggtacctgagaaaatagacgttaagtcttctacgtattacaagcgagactgtttcagccaggagcagcaagtggaaattgttttgccacaaaaaacaaaggtcagaggagcgctgaaaagccctttgtaggcacaacatcagaagggcatgcaacattggtaagaggtgacgcgtagattatcaagggccaatcccactgcataagcgatgaaaaatttttaaatttaactctcacggcaatgggatacctttggtgaattttgagcaaaggagtggtggtgtgaactatctgcgttttaagaatgccttctaggctgcagagtggcctgatactaggtagaaaaggcagtgtaggacaggaaaaggagctcagagaccctttccctcccctgctcagtcattacagtctcatcttcctctggttttcattcctgagtattttactatcctaaatctgaaaaggtctctaattgtttttttttttttcaataaccagggacttttttttaaatgcatgtatccttctactaatttttctatacctatggattccagtttttagtgataattcctgttaacatattatgcttaatgcttcaaattgctacaatctaagtgactatgaacacaaagctaaagttgacagatttcttttgcatgtatatgtgtgcatgcttgttcttggtgtgctcacgtgtgtgcacatgcatgtggtggtgcacatacacatgtgagcatggaaacagagagcagcttgagtgcctttcttcatcatgctgcaccatactgttgaaacaggttctctcattagttcttattactcactgttgcttgacaagatctagaatctgctaggaaagaagcatttaggcccagctgtgaaggagttcaactgagatgggaggtaggccctgcctgcataggcaacacgtccctgggcttggatccttgactgacttttcaataggcaagtcagatgatcgtgagtatctctttatcgttcgctggctgtgaatacaatgggagcagctgcctcaagttcctgactccctgattttcccctagtaatgagctatgcctggaacttgagccagaatacatgatgtcttccttgctttcgtcagattaatttatcacagccatagggaaagtaatatctccattgcattctggaactcaccaacaggatggactgactggtcagcaaggtaccaaatcccccaattctccacctgcccggcactaggcttagaaacatgcaacaggtgctcattgtttatgcgagtgctgcagtcagcttttcctacatgcatggcaagcattctaccaactgtgccagctccccagcccaaagtcatcacatctctgtacaaaaagcttgtgtattttaaattgcattcgttcttattgaagtttcatatttaagacatactttctccagcatgggaaaacaaatgattttcctattataaacttgccaggggttgagcaggagctgcccaaaaatacaaacaaaaattactaccttgttttacattttacattgtaatcaactgtaagttgacttatttaaagagaaaggtaaaagatattatgtaacaatatgaaacagtgggtctagtttctcttgtttgctctttgttttgtttcatgttgttgtgtttgctgtgacagatatgaaagaaacctagtaatagaggaaaggcttattttagctcacacttctaaggtctcagttcctgcttgactacagaatggcacatccgaaagctctggtggattagatggccagaggggcggggggggggggagcagactggagggagccagggcaagatgtagcctccaaggaaatggacccatgatccttgagccaggtctctcccatcgctgtgataaagcaccattaccgaggcaacttgcagaagaaaaaaatgtatttgggcttgctatttccaagtgatactggtgttgaaagcacatgcagccaagccagacttttctcctgggtactaggcattcgatctcattcttgctcagaaagtattcttgcccacagagccatctgcacagtcctcaccggagtgttaaaatagtgagcgtgttgcccagttttagatcttagctgacactgactctgaatttgttagtaagtcattggtttataagttttgttaaaatgcatttttgactagaagtaattcagaatagccttttaaaaactatttttctctagtggccatttactataacaaacaaacaagcaaacaaaaaaccctctcatttgattatgcaatataaaaagtctcccaaggtctgagaattgcacttatctatgcgtaatgggtagagagacacaaaatatctccatgcaatgagttaatgaaggaactcacaactggtcaaagtccaaaggacaagtgctcagccactgagcgtacctctgtatcacactgccttcaaagctcataggctaccattacagaaatggaggcagaaagattctaagtgccagaggtctgggagtggcacagtgaatgagacagggctatgaactgagcctgcctgtgcaaaactaccataaaatcaagccagtcagtgtgctagcttgcaggggaagaggctcacgagttcccacccctaattgaggagctacccctaattgatggatttggggaaggaaagtctgttttctatatggatgtggccctttggtagtcacaaggggatagccctgcaacaggaatatatgggcagcctgaattggactctgaaaaaaacgcttacaaaatggagttgtatggaatttgatggggaagtctcagaggagttcaagggaaagtgggggtgaaactgatcaaagtatcttgtatgaaagtttcaaagattcagtaaaaatatttttaaagcctactgagataaagccaagagcaggaacattttgtacagccatgcttaagagcaggaatgcagacgttttaattagaataaaaagaatagcaccattagcaaataactctaccatgaaaaactaaatgagaggaaggaactcactgctgctttaagcatgttgccatgaactttatcaaaaaatccataaactgagtttgtttctatcatgtcccaaagtacaagataaatttatctcattcattttatttaaccagatagatatatagcacatttacattgtcctcacagacaacatgtaaagccgttttcctatattattatcagagatttttgaaccttttcaggatgtttccatgctaaaggctgagatccacaaacaacaaaaaaattgtcccctaaacacttaggctatatatacgtattactgaatattttgaagaaaagagagagagannnnnnnnnnnnnnnnnnnnagagagagagagagagagagagagagagagagagagagcacaaaaaacaaagaggagcagatcctggccacaaacaactaggagttacattaacattatccaggagctggagagatggctcagaggttgagagcactgaccgttcttccagaggtcctgagttcagttcccagcaaccatatggtggctcacaactgtctgtaatgagatctggcaccctcttctggtgtgtctgaagacagctacagtgtactcatatacattaaataagcaatataacaaaattaacattcttaacatgtcttattactgcagtggtattctaagatttcaaaagaatttctaagatttctaaaacatgaggtaaataagtaactgacatctatactttagagaaaacaaatagaaatattaaaagctagaggagagttatagttgtcatatgtttaaattaaaatacatggtgatgctattaatattttgcaacatataactaaaagacatcagtctgtgtgcagtcccaaacatgacaaaaaccagctctggatggacagactgtgattagcacacacactgattagttctttaatcaaaattaaggagtaggggaaagcaggtacaggttgatggctaggctgatagttagactaatagaataaaggatggagaaagagctttctgaagcagggaaggcagcagaacccactcattcacagaacattacataagcgtgactgtttcctctcctcttgtatcccacggtgtctcttctgtatatgtgattaactgggtcctgttttcttggtggagtctgtggcttgtggaattgtgatttttaactcagtctagacaattatacactaagcatatttcagataccaaaactaggccagggccctaattaaaagatctgtgctcatgtatttgtcactaaattgcaaagataagtgaacacgcatgttggggattaagttaccgcgtgtaaagaaggtgaaggagagagcagcctgaaacagtaagtagcatcagaaaggaatcattctagaagacaaaggatgactgggtcaggcaagttagcaatcatctgcaatccacagatgagtaggtattaggatgatgctataaaatcaaacctaggatccccggcggcttcttcatacatgggatgataattatgttaggccctgtgctggggattggagatggcagatgaatgctcagtccatttaatagaggcttcagcagagaagcatcagcaaaggcgacaagggactcagaagagcaggatggactgaataaacagaaactgttgctggtgtcactatgaagaaaggaaatgatgcattttaaagatcatcataggtacacctgtggtatcccgaggccacacatccacagctagaaagtgactcttcaaatcggcaaggtccattaaggatatggcaatgtcagttatttagaggcaacaagaagtaagaatttcagaagagaagcaggctttgacatattggatactaaatcagtgagcatacagaggtcaacaggtggaggagaatgggaggagtccaatgctagttggactcttgaataggagaaagggacttagaagcctcttgtcacaagccctcagaaatctatggaaatctttctaccattgctgtctcagtctagcatcagatcctctgtgaagcccttcatcactatcctccagacataactctgagccctccgggatctcacagtgtctactttacacctagatggcctggcactgatgacactatgttatggatatcacaactcctcctgttgtgatctctgtggccagctgggatcacagcaactgataccaagtaaatgctcaaaatcgcttatgggtctgctctaaactaaggaagatctgtagcagtgcaaatgtatgctccatgttggagggaaaggatggcaataaaagtctcagacccaccaagacctccaacaagaggcctcgtgcgtccctgtgagggaaccatttgtgaaccccagtctctgcttatgtgtatgtgcctgtatatgtgtgtctttgtgtgttaacgtgtagatgtgtagttgtgcggatgtgtgttaatccttatccttcacctggtttaaagaagggtaccttatgatttaccattgcataatgccagggaattagcttctaggagttcttccttctctgcctcctatctttccattagctccccaagattataagtgtgtgctacagtatctatcttaagatgggttctgaggatccaaactcaagccctctttactcactcaggcacacccaatcctatcctgacttttcttactttgttgttttgtttttcaaagcagggtttctttaccatttcttactttttaaagcctaatatttaagggggggaaagcctcagacaaaatgttcaaacatttttacttaaacttcttcatcccgaggatttgggaataactcacaactattcctggctgacagcatagccacatcctcattccagactcatttcagagcaatcagatctcaccggtaaaactgcaggaagttaatgacgaatggctgggttgagcttgcaaactaaaatgccaccatgtgttctcgtgcacagcactacagcgggcaaacaccaaaagaagaaacagggaagagacagatttgagtctttcatgtgataaacactggttgaaagtcattttggtgaagatgtaatttcaatcttaagcagttctttacagaaacattaccttatttcactggaatctcctctctctctctctctctctctctctctctctctctctctttctcctacaaactttatctaaactttaaaaatacagatagttcaaagtcagtgcaaaccaaaaaagtaccaagattaataacttagctagcataaaaacatcaaaaaactaagattttttttcttgtgaattattaaatattttgagcgtttcagaagtaatctacctttgttcatccctgggtggatttaacaaatataagccatccagcatttttcttctgattttttgtttgtttgcactattattgttgagatagagtctcactatggatccctgactatccaagaatctgttgaatagaccagcatggcctgtggctcaaagagatctacctgcctctgcccactctaagattaatggggtgtcccactatgccctctttgatgttcttgaagaaatatctggtgcatggttggtgtccaaggagaccagaggaaggaatcacatcacctaggactggtgttatagaaagttgtgagcagacgtgagggttttggtaatcaagctcaggttcactggaagaggagccagaactcttaacctctgagtcacctctgcacccctaaatattattttgaaagaaaattgcatattattgacctgcaaattgataagggaaagttgaagcgtggggtgatcataaaagaaaaccagttggcatgagctctgattgtgcaattagctaaagccagcataatttaatcagtgctcaattacataagcatgagctttgtgactataagaaaacaactgatacaaaaacactatcatcagttgctcattgattccatgaggactgacaacaaggagactccagtgttacctggcatttctatcttggacgtttttcagtagatatttgtactgcagttttacacacacatgtttgcaacacactcacacacacccattcactgtttatctctctgatcttgctcatagcaaaggaataacgaaagcttaaatatgccttcctgttagtttgtttctgtttttgtttaagtgatggagatggagcccggtatcttacacattgaaaacaagtatcttaccactaaaccactgccgcggccctctttttcttttactttgaaccaaggttctcaatatgccctctttttcttttactttgaaccagcgttctcaatatgtcatttgagccctttatatggatcagacaggtcttgagctcataattttagtgtctcagtctcctgagactgcagcaacaggtttatatgtcagctataaccagatctagtggcacaagtttataatctaaaagcatagatatgtcagagctggagaaacggcttggccatcaagagcacaggttgtgtttccagaggacctgggtttgatatccagcttacaactgcctagaaatccacttccaggtaattgaaggccctcttctgtccccacgagcaccaggcacatctgaagtgcacagagagacatgcaggaaagcactcaaacaaataaaataaataaaatttaaaaataaaattaaaacaaataagccataaaataaaaaacgagatgtgccatcagataagactacactatttttcctctgaagaagatggtcatggatcttcttataaagaaagaaatagaaattaaccagacaagtagaaacttgcttgaacaacgtaatggacaaaattttcaaactaactcctttaacaaaatgtagaactataattcatgtcctgtttcttgtctttcatgaataaaatccaaaggcaagagataaaaaaatgtagtttcctggaaatctcagctgtgatggagcccatgtacgtgtgtttcttttaacctcttcttggctgaaagcatgccagagggccagcttcaaatccaaacaggaaacacaataccagctgaagtgggaggggaaccccagaacactgtttgcagatgtcactcaatgtgatcgacataagggggaaagtagaggttttgtccatcacaagattaatatttaatgtaatttttaataatccaaatttcatgcattctgcctccgtgcacataaagaccatccaagcaaagcagccacacttctggccatcacaattcttggttatgacctctacaggcagagcagccatacctctggtgaccacagtccttggatatgactcatacaggcagagaagccacacttctggccatcatagtccttggatatgacctgtacaggcagagaagccacacctctggccatcacagtccttgggtatgacccatacaggcagagcagccacacctctggtgaccacagtccttgggtatgacccatacaggcagagcagccacacctctggtgaccacagtccatgggtatgacccatacaggcagagcagccacacctctggtgaccacagtccttagatatgacccatagagtcagagcacacacctctggccatcacaatccttggatatgatctgtaaaggcagagcagccacacctttggccatcactgtccttggatatgacccatacaggcagagcagccacacctctggccatcacagtccttggatatgacctgtacaggcagagcagccacacctgtggccatcatagtctttgtgtatgacctgtacaggcagagtaaccacacctctggtgaccacaaccactgcttgtcactggcatgttttcaggcttgatggcaaacagcatgcacgtgatgctaatgaagagctttgcttcaaaatatttttaaagatgtacaagaggaagagaaattgtttactttgattattttaagatgtaaatgcagctgcttcgaaagaggaaaaataataatcaaggaaaaaaaagagggtgactgtgatccatgacaacagatcaataattagcttttgcaatggttctatctcatgggtggaggaagggtgtgagagtgcttcctgctgcaggaccgaccctcctttggtcactaaaacattgtcattagttaagtgtccattccctggattgggttttattttaattctgagagccaagctgtgtatacatagaatgattcttctgtggttatggttgttttcctggtgtcactgttgaatagaacttggttagtccctgtcaccacagtaaaaatataagaaaggaaatccatcttgtaccacatgctcagctcctccctgagtctgcctgtccatctggattttgaattttgaacacaatgtgggaagataaagaaagcaaggaaaagtagatcaagagggacattgtggtcatatttgtttcctaatagtccactctgctgtgccttaagtagcaaccctctaagcctattgattcttccctttcttctatataacaagtgtattgctgtccagctttgtgtccttgcccctctataccacagtgccttgtagtaagtggctctcattcgtagtctattgtagtgtagctagcattatcctttgcaagtacagctttgagcatgctgaccttctcctcaccctgagctcagaaagctttcaggattcacccttgcccaaaagatgaaggctactccttggattggaattgagctccctttcaatctacctggacagctgtgattccctttcaatggaaagagctcattcgaatcagacagatctaaccatagtcctcccgggacttgaggctgtcactctatacatctttcccccatgtctctgcccaccaccgcttgtccccatctaaatactatctatgtctttctagacatttccctttcttcctcttcctcttcctcttcctcttcctcctcctcttcatcttgtgagtccagagaatcagaaggaggataaaacaaggacccatgcacaaagaaatgtgctagccacttcagctccctgtcctttctcactagctggtgttggtttacttggtgaaccaattctgctgaatgtcccatggtgctctaaaccaagacattttctcacctatctctgcaacctaatagtgtgtcactaaatgtcatgtattaaagcattactaaactcatcaggatacgatataggtgaaaggaaaggatgtggtgaaccagctgtaactaaagatgtctcagtggatgatccgtgctatcctagactggaaagctaaaactctggctccaaatactacctggagagccccaccctatccctgtgcttcagagtggctcacgttgaatcttacttagggatataccctggttaaggaaaagagtatttcatctaatcagatctccaaggccactcaccagaatcacccatagtgtttgatcccgttccctggatctcagaccagaacagccaagaacctccgggtttcagcccaatctcgttggcttctgaactattctacaaaccattcatctgcatccaggttagacaggaaagttaatgatgaccaacatttgttgcaatattagaaatttacagaatctttgttaagcaaggaatatatgaattactccatttagtccctacaatgctatagtcactccattttcacaggtgcagattctaagacttgaagaggttaaataactagtgtagtaccacactgcttgtccataatcaagcctaggtcatacataggcctgataccaaacccgaagtttacatcacaggctctatccaacttgaacagactgatgtgtagccacccatcttttcccaagcagaaattccttctggtcaacacgagattctgttttggaaagttctggcagcacctattagaaagaatttttttcagctcagtttcctattgactatatacttggctcttatccagtcagagtctcaatattccaagatcttccctgtagtaggtcaacttctaagattctttatttccttacaaaattatcaacattaatagcaagtaagccacttccatgtataatatatgtcttaccatgagagagacagagggctatggctcagtaataaagagtactggctgctcttacacagcatctaggttcaagtcctagtacccacatggcaggtcacaactgtctctaattctagacctaggagacacattgccattttctgtggtctcagtacatatcaagcatgtgtgtggtgcacagacatacatccagacaaaacacacactcatatgttaatttttaaaattaaaacatgccttatcatccttgtaaaaatcccagtgcatcctggataatattcatggagatggatattgctcctaggttttaaactgaaagaactgccatgaccataaagaaaaaactcacatgagtgacaatatgagaccagccagctttactctcagttgacatttttctgcccttcatatataaagcttaattttctaggacattttcacattttcttcctcatttttttgccttcacaattcagaatcattcctgcactgaagtttctttacagataaaaatactcataatcaacttccatcaaaaggagaaatgagagctaatgagtaaatgggcttaaagtatcacaagagtctggaatgagaggcgcatgctgttttactgttattaatgtaatgcagccatccatcacagtgagcgcagacagaggcctcgtttgctggcctggccagagtgggtctgtctcatagccccagagacaatcaggctcaatggaaaccaatgacaaggctcaaaacagcccagaaaggcagcccctgggatcgctatgcaactggatgctttcaaatggattaggaacgttagacagtcaaaatatggcatggacactgagccaaggaccttgagaaaggaatgtgtcgccatgtttaatagatgaaacaaaatctagtgaaattagagggcgaccgcaaaccagacgcatgaataagtaatctgtgagctggcagggtttgcttcctcacacttaggagatggcaggcattcctaaacacgtgggggaaaaagcatttaactcactgtacaccatcctcacaatggtcatttcagtgaggcagggaactaaattaatgtcaaacttcccaagtactcatgagtcaattataactgtatgccggtcatcataggtactaccactcagttcctatactttaggctttgtacagcatcctggattcttttgcagttatttctttccttccctgtgactcagggagctaaggttttcagtcagtgttaactgtatctgaagcagttggtggtggtggggggggggggtcatttcacatagagaccctgaaattattattttcaagtatggctgattctttgtctttgtagctgagaagaaaagaaagctatataatcgcagtgtcaaaatgtcaaaagactgagatacacaggaaaaaaaggaagaaaaggaaagaaagcaaaacaaaaccagaccctgaaaggcacgtgtgccgtgctcagccctccacatccgggccttgcatgtaatgcttgtggcatgctgtaattaactagttactcctctcagaatgaataataacgcaattatttgccaaaagcagggaagaaggatggtttctgtttttaaaaatgaatgcctttcatttctatataagaaaaaaaaatactggattcatttgcatattctgctaaagccagtgacctgcatcttcaccattagcttgtatgataattctgccaccttcttaccagagccttatatatttttcagtggtctgaaggagcaataaactgtcaaactgctaccacgttcacattatatcagtacctagaactacacccaaatatcacagaatgtatgcagtgactggctggtgaaagtatctcctctggcaagtgggatatctatgccactgtggtcatcaaggactagtattgtgttttcttcagctgtgaaaagacaaacgaggaagccgagagcctgagttcttacagccccttctccatggctcatgagtcaaacagcatgatttggtactgctgcactgatttatcatatcactagctatccttcccaagttctgtcaaaagaaactttcaaaacagagctatcagagacagaagagaccagatccaggaacgagcagtaaaactgaggagcacctgagactgtgtgagcctagaaacagaagttttgtgacagaacaacgggagagtaaggaataatttttccgtattgagttgggacagccccttaagcataagacctcggtgctctgtgttgcttgtgttcatagccaacaggttatactggttccttccatgtagcaaactggtgtctgagtgaccatgcaactatctccacgttccttcactcttcaccctccctggtcccatttcctctccagttcccaggccttttaatggaggacatctctaatgtttttctcatcggtgttggtgttgagactcactgactgtatgcttgaattccttccaagtccatctctgcaattcacttaacaagggccttttaattgaagatttgctctaatgcactgtgctaaatatcagaaattcaaagataaatgggataccttgatcctgaaaaggttaaagaagagcataaatataaaataaaaaaataaagaacattatttattcgaggcagtgcatactactgtgaggtagatgagcctcctagaaacagattcatcattgctaagaaggaaagcaatattaccccaggaagcagaaactcaggtaagattgctaaagcatgcaactttacacacacacacacacacacacacacacacacacacacaaacacacaaacacacatgcacatttgagtttatttcagtggtttgtatgctttgatatggttgcataactatttaactgtgtatgtttaaatttagccaagtttattcatagctttaagtggtaagattaatgcaatactcattagattagtaattcattctaatagctggcaccaactcacagttgcataaaagtatccctcaacaaagtgtgccaatgttacaaaagttttgatcatgtgtttggtaagacaaagattaagaatcaatatgaactaaaactattgtaataaatagcccaggcgtggacacagcatcactttttaaatcctactcattcaaagaatcccttccatcagttatgatatgaatgtgcatccatcttggttttccttgaacttcaatttgtggaatggtacagtctctggcgtcaggctgcctagatggaaaattatgttctgcttacaagctgtacggcttcctcaagactcaattttcttacctattagatggagatagtaatagtggctgcccgtctttgcaaagtattaagtagttacttcttcattccacttttttaccaattgtttttcaataactacacagttattgaaatttgagcatacctaaaatagtgaataaaatgaggacagcaaagataattcagtcattaacaaaaagagaccatgacagaaactcagactaaggtcttagatcctgcttattgttgtaattcataaagctaacaggcttaaatatataaaatacagtaagtaatggtggtagagtcagagtttattggtttaatggaaacgtatacagagcaggtctttgcaatccatccagttttctctctccccgtaccacatagtttccgagccacatcaccttgtctctgaagcttcttccatatatttaaaaatggaaagagatgggaaagcagaccatcaggtaaagttcatccctcccatgtgccaagcccttaattatgtcaccagtgccacataaactaaaaggtaaaacaggaggatggcagaaggttaaggtcatggctatgccatgagttccattccagcctggactacacaagacagagagagagagagagagagagagagagagagagagagagagagagagaaaagaagaagaagaagaagaagaagaagaagaagaagaagaagaagaagaagaagaagaagaagaagaagaagaaggaggaggaggaggaggaggaggaggaggagnnnnnnnnnnnnnnnnnnnnnnnnnnnnnnnnnnnnnnnnnnnnnnnnnnnnnnnnnnnnnnnnnnnnnnnnnnnnnnnnnnnnnnnnnnnnnnnnnnnnnnnnnnnnnnnnnnnnnnnnnnnnnnnnnnnnnnnnnnnnnnnnnnnnnnnnnnnnnnnnnnnnnnnnnnnnnnnnnnagagggagaggagagacagaaggagagacagaaggagagacagaaggagagagggacagagaaatcagagggaaggagggagggacggagggaggataattcttcatcaatttccaatttaagtcagtcttgagattaagaagatagaacttttaagtgcctgcttgtgtattgatatatggttgtatggagagtagtgaagagtgtggaaaaagaccaacatgggtgtatgcttttatgaagcttagattctggagatttagtgaaaactacatctcactttcacttaagggaatctgacctccttttgaggcaataatgcaatgttgacataggtacttttccatagccattccccaaaactgatttatttgaggtaataagaagcaaatctccaagaaagctgggactgagcaatggcatgagcagaccaaactcaaatgagtcacatagggtgggcttggggactgacccctggggaagagcatcctatcaaatgccctgaaaagttgtcagtgaggtgctgcggctcggtggaaatgctgaccctgggcgcatcaactcagtcaactagtctcttctccttgctgttctcatttcatcgttcagtttgatagtaaatggatttcagaaattataattactttaggccagttacaaactgttcattcctgagcttctctgtaacacctccactgccatttctataggcagataaagcagtggaccgttcagtttgttctgcttgcataaaaactttataagactggaaatttttgaccaatagttcaaacctaaacaacctttaaaatatcaagaactgtctttacacaatgaggcaagtgggcctcaccactctggtttatttttaagatcagtgttttgggtaggctttgatagttggggccactccttaagggccatcatgagaaacgcacgccctctgtggtctcaggcagctcctgatctcagttgctcagataccaagaggcaacaacattggactcctgtccataatggcagagagagaatgccaccctgggcaggggtggggagggcagggagcttaaggattcagactgttgccacctgtcctcactattatttctgaaatagattaatataaaggtaatcaggtactactagggaaattctaccacatgcacaaaaatatactttcaagcacactaatgcatttcctgcccatattttagcagtggtgtaggtacagatgatctcaagactacatcctgaaaatgcctagtgtataaaagagcctttgctgtattgcattgatcaagcatgattctcaggcagtgaatcttcaggttccagagttactacttaatgattaagaaatctaggcttctaggtaggacctcagcctccacggggcacaagaatctgcttgtcagtatatgcttctaaagttctatgggcaatcctaatgtgcaggttgcagtataaaaggagaacaggtaggcctcacatatcacatctgtgtgtacctgtcctataccttattagctttttgactttatgtgttgtctaatatagtggtctgtgtaatggctgctgcaaagtttaaatgaaacaatgaatttaactgtcagtatgcagtgagtgattactctgtgtgtgtgtgtgtgtgcatgtttatgtgtgtatgtatgcacacgtacacatgtagcaaattaaaattgtgattcacagcataaagaaaaacatacagagtaatgaatacaaatatgaataaatatatttaaaattttaattttataccagtttgcacacaccaaaaaatacaatatattaattatttatatttattattttaatgtgtataagtgtttctctgaatgtatatatatatatatatatatatatatatatatatatatatatgcatctatatgcatatagcacccgctgagcccagaagagggtgtcaagttccttaaagctgcagatacccatgtttgtgagccaccatgtgggtgctcgttcctctgtaagaactgcaagtcctcttaaccaaaatataatatcccaaataacaaagtaaattataaaacaaacaattaagagaaaattgaaaaataattttataaagtttgttttgcagtgtttaattgtgttctagatgatccaattctctttaattcaccagatgtttctttagcctataggaaaaaaaaaaaatgttaaagccataagtggcaaccaatttgaatttgtcactttattgtgtaaaataggagctcaaaatagaagctgtgtaccatgggaaggaaccttagaatgtgcagaaagaaacctgagaaccccgcgggatttcatgtatatgctgtttataggatgtgagcatttctgagagtctggctacacctttcgcttcactctggaaaggtatctgtggcactcggaaaggttaaagaccactgaaggttcccacttactgctcttcgtgcccactctcctttgtgttggagaaatacctcttctgatggcgttccaaatagcgtatttgattgtgttctgttctactggcccctgggaaatttttctcaagctctccccgtttagccatccaatgaagaaagtacaggaatgcacttgagtcacgtctgaagccattctgccacagtagcctatttgtattcttcaaacatccttgtggtgtttatgcatgtttatttttgattcattgctgggtcctctggattatttactactaggtctgtgttgcatttcatctcagaaagctggaagaccttctctggaaaagcacaatttgattcttctgcattttgcccagctagccacttctcccatttgtatttcagccacagtgtggtgacatcactactgacattccatgtattattttgctcttcctttaggtgtgtgtgcaacatagactgttctcaaaccaacttcaatcccctctgtgcttctgatgggaaatcttatgataatgcatgtcaaatcaaagaagcgtcatgtcagaaacaggagaaaattgaagtcatgtctctgggtcgatgtcaaggtaatgttcatagcaaaatttcatttcaaaaaatgtttttagtcactgtgcagaaatgaaaagagaaggataactcgttatcaggcacctatttcatttccaaaagacagttctgattcacaatggatcgtgtagtcagctgtagaatttgtgttgattatgggtgtttgaaggcccatcagcaacagtgcatgtctttttcaatgtaatggggctgtattgtgacagtgccatgaacgcaggagccagtattcagaagacagcagaaattctcctggcaaaggctaaaaaaaaaaaaagtctagtcaagaatttttgaatagattagaaatcttagaattaaaagcaattgctctttttatgtattgattcgatagaaatattttaagtacatccttaaaagctaaacaggatagaacattctggttttgttattcaggaaaaaaatggcttagggagcttgcatttgattttcttttatcattatatctcagttatagttctaaaccttcctgtcccaagcttcagaaagctaacactgctgtgtgactcacatagacttaataaaagtgcattgaaaatctgattgtatagagtgctcaaaactataaatggattgttgttgttgttgtcgttgttgttgttgctactgttgaggaagacaacaaaccttaactaccatgaagaaatgaaggtactttggaagagcaaatttgatagatgtaggaaatggttaactgcgttttattgttaattttttaacatagataacacaactacaaccactaaatctgaagatgggcattatgcaagaacagattatgcaggtatgtaaaatttcctaggactagaatgagagcctgtttgtgagagccttgtccaccactgtttacaccttgagtaccgctgtttatttactgtttatttactcctaacctgggcatgcactgctctttcttcgaagttcaagctttcagtgggcaagaaggaattttttattgaactaaataaggcacacttttttttttttgccatagttaaagcaattgtcaaagatgtcagtaagatataattaacttgttttgacagtgtaaatggtacaaatgacaaaacatttatcaaattaatgggcatcaatggaaattaatgcaaggtttggcagtttattgtaataaatgcaaatgttcttgtttgaattttcataaaagtcaacagtggaaagtttgctgatctctgacaagatagaaataaagagagttgcaagagctaacacaaggctactatgaagatacagagttgaaattcatgaataatttagtttttaaagaaactaacatgtctcatttatttagattctagaatgcggcttctcagacatgcaaagttataataaactttatgtgaaagtataaatcttatttagcaactatggaacctactttgagtaataaaaatactacctaatttaactcttctacagtgagcaataattgatggaatgcaactagcatattatcagatgactataatttatgagaatttaaggtaaaattataaaaataaaattattgagttctatgaaagtatccaatgaatatttatttatttattcacatattcatttttgctgttttgagacagtttctctgtgcaacacttgctcttttatatgccactatgtagaccaggctggcctcaaacctgtagatatccagctgcctctgcctcgttagtgctgggattaaagacacctgccaccaagtacagcttcaagggatttttaaacacaacgtttcatttagctactgaacacttgtaaccaattttacaactaatactcaaacccaatcaattgtttcttgtcattcaaaatatatactaccatttttttcatctgacttcattattttattttacttaatgataattgtcattatgtttttacttgaacaaagccctggtaatatcttaattacttgcatgtatcagaatgtggacataagaggaatttaacttttgcatattttgtcttaatgttttcaagcatctagataagactgacatattgtaaattcctgaaactgccagttatccaatatattaactttggttctattatatgtgtatataaccattcccaaaacaccactgaagatattaacagatgcttattaagaagaacaactagtattcaggtcatttagggagtgttaccataagcaattgatcttctccccagctttcttcccttctttccattatacagtctttacaaatatgcatgttttgtgtaaaatcctctgtcagagagtgggttctggaactggttccaactctttacaaacaccaaagtctaaggacactatagtctcttttaaactggacttctgtttacatattacccatgtgcatcttcttctatgtcttagatctagataatttataatacttaatacaatgtaaagtctatgaaaatatctgtggtattgtattgcttaaggaatgatgattttaaaagctctgtacacattctggaagatgcaagtgcttcacacatatatttttgaatctatgaatacagagctcttggatatggacagccattttattttaccttttttaaaatttctaatgtgtgaaattcactcaaatgcatgtagtataatatcatgaatcctcatgtaattatcttaaagaagaagttacatcaactcatggctatgtcttttctcctcctcctcctcttcctcctcctcctcctcctcctcctcctccttctcctctctctctctctctctctgcctctctctctccttccctgnnnnnnnnnnnnnnnnnnnngataagagccctccccctacctatatagatccgataaaatgtcaaaaatcacaactaaattttatcatacatctcaaaaacctttttaaaatcacagcactataatcatctcttaaatacttccaacctcttatagtatacaatatacatcagaatcacttgaagaatagcacatttttgtaaaagattttgcaggactagtgctcccaaaattgtactccaccaatatgttgagccatagaaaacttattaaaagtaataaaatacaatagtgacatataatatctgagggtgattctttatgctttaagatttaaatagaaccaaataaaaatattacattttatcataaacaactatcttgatggtattataagctacttctattaaatgcatttatatttcctgtaaatgatgactttatatttcctgtaaaaactaattcatatggaaaaatctttaaaactgttgcatctgtgactatcctggaaccattcatgacaggacttataagagtcaagtctttccctgaggatttttttccccaacgaggaaccccagaggttcattggcaccctgtgcaatgcctgtgtgtacactcatctgtaccaggagattccaatacagggtctgccaccttcatctccattcacattgtatagcacagttcaccttcaaagaaaacagtgggttgcatttctactccgaatatattcaggtttgattgcaggcagtgaacctctgatgctgattaccactctttttagttcactttgttttttattttttattttaaaatatttttctccattcttttctttgaaaagttcatgcatttaaacactacattttgaacatatcaaccaccattacttccctccagctctcccagtaacctctgccttgtcatcctcccagcctcacatccatccatcgtttgttcttgttattatgaccccgtgagtccagctgttgacagttgctgaggaagggagggtagctctgcctgctggatgtgggctggttttcccatgcccccactgatggccccacacctaagcacataggagctgcacagattgttttccgtcctaattgtatctgcttggtgcacatagaaaagaacatttcccagtgaacataatcaggtcactcagcatcctagagatttctctagtttgacaacagaaagtcttgtaagatgaaaaattgtcatgattaaggggcaacaggcagactgatcaggaaaaagcacttgctgctaactctaatgatcagtgtttggtccccagaacccatcagatggcagaacaaccagctcctgcatgtctcctgccacttccatctccacactgctactgggcgtgcacaagcacacaccgagacactaagtgcacacaaagtaaagaaacaaatgcgacaatttctaaagttatgtttaagcttgcatgcttgctagattccaaataaaatagagaagcaaaaaagttcattgaaacttgcaactcatagttaaacatggactgaatacatgaagtcctccctgacgttacttcagcttcacatgatttttatacatggttttattgaaacatataatattagaaaacattgaaataattgtgtttctcaacatttcctagtacccagcaggattttcattttcccaagtttgggacatagacatgaagatctaaaagaatcaaatgaaaaatcaatatgttattgtctggataatttatatttcacatgttataaactctccaaggagggtaaacaggaactctatgactcacatccctagaaatctgctctgtgctcacaattaatttgatgtcacagcaacttcccttgttaaacaaatgtccacggacgctcccactggaaggaaatagcagttgtaactcacacttttccagatgtggcatgagtactgtaaacttaggaacttttaccatgccctcccctttcatttttgagcctactttaaaagctggcaacacttgcttctaactaaatagtggctatcttctttaaagaaagtctgaatattaaaataaatttattgaacctcctttgtaataacatctaaaggaaaggcttcagccaggaccaacagagactggattacaactttaatttaaatagattttatttattaaataaataaataaataaaagaatactatgtgaaacaaaagtaacatatgcaggaagctagaacgtgtctaccttgtacagagacaggaatctatgttcctcataggcataaaagtgtagtccacaccagaaaactgaaagaaaaatttccatcatatttcaagcagaattactatctgtttgggctgtctggaatcaccttcctgtcctctctcttttaatgagacccgaggcattttctgactcttgattcaaaggctttgcctctctgtttgccaggcccagtgataagttcctgccatagaaacagaacagaccctctgataccagtccacaagcttagacttaggtctcttttttttcactacagaaagagccctaacccacgggttttctaaatcacaaaggtaggacttcctggctttagcatatgataatatgataataataatcttcccttgtggacacgtagataagatggcacactgtgtgtgtgtgtgtgtgtgtgtgtgtatgtgtgtgtgtgtgtgtgtgtgtgtgtgtgtgtaccctcaccaagtcttgcactaaaaggaaagtgaattttaaaactgtgcttctctatgtccaatgtgtatctatatatgtgtctcctgatgggttcctgtctggctgagaggctcatcaagccttggaaaacatagacacatattttttttccagtgaaaatgtacttaattttatagcttgttagatgttcacaaaaaaacccataaatttcaactactttagtttttatcatctaaaaattaaaatgtattttattttgtggtatcctacttatatcagtttccaaaaaggatttgtggtgtttttataattaaactacagtcaatgagggtctttaaacagagatggacaacatggagagctgaactgttaggggaaagaaaaatacctgagcatggctattccggttaaagcacttagccctaagcttctttgcaaccagtataagaaagaaattatggttgagtcggtttatttcacaaatatccggaaagtcctgctatgcagcaatgctgtcccaggctctacagaaggcagcacagaagtcccagtctctgtgaaaggaacctgggtcttcattgtctggaaaaaatgaataaaaataatttcagagaccaaagagaaagttaactttgctaaattatatgtgaaatatttagcacagatctttttatgaaccataactggggaacataaatggatagaagcttcaaccatgatatttataaaatatcccaaaaagctttctgtatagctgaggatttttgaatatttttttataaaattctagagcacaaaaagtaagatatgtatatctcaatgacacagtgtttgaaactgattgaagtaatgagtccattcatgaatattctaaaatggggagggattaatatcacaggaaagtggtaggagaatctgtaaggaaagcaagtctagtttattacccctgagtgagcagaataaagacctatgacctgtgtaacaggacagatagagcctgggttggacagacagtgctcagtgacagtgtgtatgtggctggagaaagtcccctggtgttcatgttggtcaatgagaaaggaaagtcccaggctctctgtgccttcagaagagccagggcctttctcctctgggtctagtaccaaacagagtctacctatctcccagagcattgctttgtggtaattcaccgtctcttgtcacttcaggaagtcttaagttttaggaaacatttcttttagagatgtgcttccctttaaacaataattgagatattatgcacaagtctgaaatgtggaagaaaaaaatccagacttacaaaccaaatcctctctatcctattagtatcccgtcaacccattttccccacaaagaagaaactgacaacctaaaagggtatcaacgtagtctaagtgaattgccaaataacttgttctttgtggaagccatcgcaatttacaaagcctttccgcacatgttgtccccttcagtcttcacaacagaaatgtgaagaggcattagaagcatctgacaggtgagaaatggaagttcaaagagattaagtgaaagagattgcatggcagagctgaggttcgagacagcactgctaattgcagaagccagcaagtgtgagcagcaagggaccccagaaaagtttaactgcctaaaactcaggagctggggagcgaacactacaccctgaacttaaccctttgagagcttcaaattcaagaatgttctgctgtgctgttgaggctgctgtgaaatcatctgaagtacttgataatctctccatacaccctcacggtccctaagtgctatttcgattgaatttaaaatctctgccccctccccccaggctgggacgaagactcggtcagtaaagtgttcacgttgcaaatttgaggacctgtggttgatcctcagaaactgtatagacaagagtagacgtacagtagtaatctcagctctggagaagcacagatggaaggatgcctaaggctcgcggaccaagcaaccagcctagcctacttgctgagcccagaaagagaccctgtctctagaggacaaggttgccagcagctgaggaaccacagaaggggttgtccttcgacctccacatgcctgcacacactaatatgtatgcacacataaatattcatacataggcacaaacggatatgcacatgtgcataaacacacacacacatacacacacacacacacacacacacacacacagccacatacacattcaactcttctattgtttcctgtttctctgcacagcagagaatcctgagtagtgctacagtaaatctcccattaattaaaaaaaaaaaaaaaaaaaaagattcccagcttctctgcaataatttggagtttacaaagattcattcacattaccccatttgttttaatgtcagcccataaaacaaggttacacatgctagaagtaatacctaggaggctcaaaaagctataaatggctggcctggaactggccacagtgctttaattttgtccacctgcctgtgcaaatggggcagttacttgatttgttaaatatttgccttcatggcttctctactccaggtattcagtcaggaatatcaagtggtttcgtatcgtatttgtaacatgaattaattcagtcatgtgacaaaaatctacatttaaaatggaagcttttttccatttgttcatgaacacaagaggcacttcgctggaaaacatgttatatctgggccaataatctgatctgtaggaaataaatagcagaaaatgcaggcagcagcttgtagcacaaatattggtatcagcaccaaaacaaataaaaacgtttgcccaggttaatacagtgccactagactatcctggaatatttaagctcgagaaatgaaattagatgtcaggatttctgagggggaaaagagtgtctcaattcaagtatgttcccctctaggagttagagtaggactgctgcaagtctctaaaagcctgtggactctaactcacaattttcctgcttccttgagctctatgctttcgttatttcctcctgaaaatcatgtaaccagtcacctgtaatcttatgttatgttcatggctatagataaagaagcagtatttgcaatacagatgaaaacttgggctgaaaagttgccttgggtcctaagagacactctgggaaactgtgtttatgccccagttcgtaaatgcattctgcactatttatgggcaccatttacgtgcgctttccctgtgtgcaatgcccatttctaaatcagttttcccacctgaaggtgttacctctccatcgacctttttctcttccatgaatgtagggcggctgagttgccagtgttcgctgcaaaatcaaagagaactgaatttgtgcattggttgtgttgtgctcggctgttaaacttgagctgactctgacttttctgttctgattgtctgtccaatggacatggtggaaatgatatgtttccatcatgcccaaactccaaacacgggaattttgagttgaaagacgttacataagctgctaaccagagactaatgagatagttagccttagtgttttgtttcagtctgaaagtgaaaatgaatggatttttatggtccattttacatagtatggcctgtgtctgaggtttaagtgcaaattcaccctctatgaacttaagcacagtaggtttgcataaccattcctgttcaagtcattcaacaactgttgcaaaagcctttggccaacttttcaactaacaagtattaaaataatatttctcaatcacttacgtctacactgtcagtacaataatatatttaaatttcacacagccattttttggggttttttttgtatacttcaaaaacttaacatgatcattatgaccttagatgtatataacaatttttaagatgatataaacatgacagaaatgaaaattatgatgtcaatttgactgtaaaaattagtggtttataattcaaggtatgtgtttaaaagacctgtgcatttattaatataaaaaaaacacatggaatgtgtgaccaagaaaaacattacaagaacatagtatatagaatatagtatattcctgttgatgtaaaacattggttcacaaagatatgtcagtgctcacatgtgaggactaactagcagatgtgcacacatccttaagtagaaataaatgttttcagcaagatgatcatgaagaaaagacagccctatctagcactggcagcaaagcagaaagacatccctgaactcaaatgtcctcccattgtcagtggtcctcccgaattcaccctcagcacctccacccctgctctgtcacttatcatgctaggaggagcagtacaagtgaaaattaaatgtacggacctggaacaatagacacgtaccaatgccttgaaaaagtttaagacaattgttttctataaaattcacactgtttaaaaacatgctgagagcaccctgaatctttcctgaatgtgttgactagaccccaacatgggtgcccacctcaaccagtgcattagaaatacatccctcgggctggtgagatggctcagtgggtaagaacacctgactgctcttctgaaggttcagagttcaaatcccagcaaccacatggagctgtaacgagatctggctccctcttctggtctgaagacagctatagtgtacttacatataataaataaatgaatctttaaaaaaaatgcatccctcatagcttggtgcttcgaccatatgcaaacataaccactccaaggtgtttttaaatacatgcaaaactaaatctctcatagaaccaatggtttcaaatactgtgtcatggagatagcttgtttacaccacttgctcatgtaaacacacacataggcaaccggcacacacactaagtctgaaatcaaatatgatcaagaggaggtaaacaccaggcatagaaaatgtgaggaaacagcactgaattggagaaagggatgatgaaattacctatatgctgtagggaggactaagttgtctataacactgtctctgagccctggggtgcagagctgggaccagaatgataggccttgtgaaacactgaactaagaggacagtacgaaatgttcttggagattggtaactggggcaggattgcaactatctttatgaaaggcaggcagggctatcagacttgtagactctgaaatgtaaaccctgaactcactaagagttaactcaccttagccaaactttcaatgtctctgcactgatttgcagtcacgtagagggcttccctcagctaactaattatatagatgatatggaagtcccagtggaagtgaggctactctctcatttgtctcatgagtctgtagctgttcaaggcttgaagctaaaggagtctggttacaagcatctaggcaataggaactctgccttcaaatcagtgtaaatagagcatgcccaaggctagaacccctcccccctgtcagaacttttgatagtctgtgaccttcctctgtctgggtttatgctaggcctcatccaggaaacttattctcctagacacacatggagcaatcctgggggtctctagaagcagctactcaccatctccaagaaaactgcacattgtagaactcaagctgtacagaggacaggtccttctgcattatgagacctccaaaggttttacacaaagctactactaaaattgttatttataaaactaacaaaccgaaagaatttgactattaacaaatgaaagtgaataggcttagaaagaaagttaatatgtgggggttttgtaaaacaatccttagcatttttgttaacaccattttcatctgtgaatgtgaacttgctactacttagtcacttaaaacatagaaaagaatgtcaaatattatcccacaaatactgagatgagggactctgcacagggctcttactgcatcattaatatctgatggagttacaaaacatttctagaaatatttcataggcaaattattaaaaatcccctactgttatacttttcttaacaattacattttaagaagtccaaagctatgtatcatatgttaggaacattccatttaagtgacgactgataataatcttcattttcttctccagacgtgaaatactccagaaagatcacactattagtttaaaccagcagcaagtactttgtgctttgtaggggagggagtgcccttccaggttcatggcggcagcttgaccatccctgtgcactgcatctattctatagtctagtaccactgggttcattccaggtttaactgaagagcccaaggaaatccaaatgaactgaagtaacctttggacaaattctactcgtgcccccacacctctgtccccttacacattccacactattgcacatgtttgcttgatattggttacttcttttaatgaactatatctgtggagacatgagggcaaccaacaggcagagtatagaaacttattaacaaggtacttaaaataagttgtcacttctcttctacagaaagagccatcaatagttatcaaggcatcccataaacaatgctagaaaaccattgactcttacccatgaatgtgaaataaaagaattgtattctgggactgaaactgtgttttctgcaacattaaacacttctcagctccttacctcctccacgaattgataaatgctcaagaaaaaagctaattgtaatattgtcttaggaaactattatcttcattacaatcaggactatcatcatcatcatcatcaccgtcatcatcatcatcagtaaacatatcagtgaaatagactcactcaattcattccaaaacaaactacaaattatatgcactgtctgttgttttggactctccaagagactattctccaatgatgtggataattatatttatttcttaatttcatttgaattttagagcaaatgacttacagagtgaattttataggggaaagagcttggcatagcagaatataaactattgacttggtttcaaaaggccggtcgttctaaggctgaacactgcattttgcagctaggaactatgagaaatctggtgatatttcccattccgtttcccagaaggagacgcaatcagccagcaaaaccattgatctatcaaggttcttttcatctctctgtttcaaatatataaaatttgtttttaaaataagagttgagtcgtactagaattgttaaagtttctttaaaaatggggatctgtctcttttgaaacttacaaaaatgaaaaagtctcatcccctgaaaaggaatggggatatacttttggggatcaggctactggggagcctcatctacctaattggatctcctatctattcagtaagggttctcataacatgggtctctgttttgctcctgttcaaagttatgacatatttttgctcacattagatgttttatacaaactcagactaaatcactgaaccaaacattgcctgtgttaaagatttttttttaatgatgttctttgaggaggcagtagccaccctttcaaagcttccttttattatccaggcttcttctcattataagtttttgtaacagttggttcatagaaatagatttaaatactgctagctgaatgctattgaagcattcaacagaaatcctttagaaattgaagttgttgtgatgttcatggaacagaatgtctgaccgtgtttaatggaaacttccgtggtagaagagaagggaccttgaaactgtgtctctaacatggctggttactgctcaactgccctgtgccaactcctcaaggaaggacaccaatgtgcaatactgtgaggtggttcccagagacagatcctcattgaaataaggagcaaacactgctgagtcttacctagtgaaataaagttattggttttgcagcaaggacaatgagggtatttgtttaaaaagacaacttgagaaaatagcaaagacaacaggaaatgataaatgagccagtctctgctacagtaattactttagcgtagcaacaaatgactaactttctcaggaatgctattttccatcggagagtatacctctatccgctcttcaatgtgtacgacattgttcttgctgctggagaaaaatctctaagaaggaagagccagtaaataagttgcctgagaaaatttgtgtttttgaaatgtccatgccatcctttgggttttatctcagttttgttttccttaagagtttcatgcaatgcagaatgcatcaatggacttgagtacgtagctgtgccatcagatcacttgcctgtttccctccctgttgctaagagaaggtactcggactgaagcaacttaagggagaaagaatttaccttaggtcacagttcaaacagcctttcatgatggagaagtcaagacagcaggaacctgaagcccttggtatttactcagtcaggaaacaggggcagagtgcatactattgcccagtttgctctctccactgtgtggtacaggatcccccccatctccccagggcatggtctctttcacaattaggatgggtctcccaatagcactcaagccataaaaatcctccacaggcaagccctggggcctatctcccaggtaactctagcttatgtaaattaaactaaaattacacggagcttgcatgaaacccagtgcaacagaatgtagagagagaaaactccaaagttcaagattatccatagctacagggagtattggaagctagcctaggctctatgagactctttttcaaaagcatttaagtaatttaaaagaaaatggaaggaaatctctctgacaccggcaggtaaataataaaatctatatcttgctgattgaagtagcacattcagggaggatttgctgcaggaggtggaggcaggaggatcacgagttcaaggctagcctgcaagtgttattctctatgtaactggctggcatctgctgagatgtttttcttatgcacaacatacaatactagttttccaaagacctatatttgaaacctacttaaaaaaaaaataccccataatcttgggaagcccttgaagaattttggaaataaggatcatgctctttcatgtaatgagagtttctctgcagggattattgacacatttggatgcacatgctgctgatattagagtggctccagaatttggattaatttccagagagaagtaattctctaagttgcatagtaaaatttgatctagctctaacagtatttctactgaagattttttaattgtggattgccatttcagtctatcagaatattaattggataataaaaaaattagatggcaagtcttctgttaatcatcaacttctcttgattgtatatcaattctgaacttatactccgggtaattctgcttcctattcattggcttaagtttcattcagacttcgtctcccagagcagtgagagttgtttgtggcaaaatgtttgtactgtgaaaaagagatgaaagccaccactgtgtcaacatgcatggagtgatacacaagttgaacaaaaatatactagctgaaagcaatattactaggcagtgagaaaacaatggttagagaattttattgtaaccacatgccaagtcaaattctaaaactggagatgttaagagaatattccaaataacgcagaaccttccctcccacatttcaagatactggattttattgagagattttaacatttatgagaaacacataaaccttcctagtattttaaaagcgaaattttaaattcaaagttcgttcctttctcttagtgtctttgtagcttttctattactgtgataagacaccatgaccaaagccatttatagaagagtttattttgaacttatgtctgtgaccatcttggtgggaagcatggtggaagcgcgacagctgagagctcgcatcttaagacataactaaccacaagacagagagagggaactgtgaccagcatgggcttctgaaacctcaaagcctgcccccagcaaggcatcccaaccagtgcccccagctagggaccacaggggagccattcccattgaaccaccatacgtcataaacaaaaaataaataataatcagcctagtcactaattttcacaaaattatttcctatctccttcccagcataaaaatgagactttatcctattttaaaatgtctttagagaaaacaatcttctaagttttcttgataacctagtctttgattacaaaatgaatatactttttcatttaacatattgttcatggacaattgaattacacggatacctttgtttaaaagaaaacaaaaagaaaaagaaaacaaaacacacatcggtagcttgtctccatagcctatgttaccattacctaccataatattttcagtaaatgggctggctacctagggtttagcagagtacatctagagactattattagactttggatttaattttgagccctgaaatagcatagttcgttcactgctgcatgtgacattttaaaaacctgagcaaacagtattattcttaggaaagaaaagctctttctcactagattcagcatttagaaacaatattgaattgatttgaatcataaaattgtctctgagaacctgaaatgaatataaacattaggcagatgatctcacctcttgcttcctgccttagtcctgttttgtttcctttgagtggttcttaatattcattcaaagtgtgcatgtgtgcagatgcatcccaaagccacagtgttttcctgctcttgtcagagcccaagcccgctacactccatactgcaggcagtgcaagctctcatgccctgggtggagcccttcagtaagaagccagatctgatcaggcaccaggcacagctgtttcgtgtgtcaagaccatgagtattctttacttctgtgtctgcgcctagcaaacaaacacgatacttttagatgtataacgctctcctggtcttgcccttcaggcaggagtctcacattccatggaatgacaaaggttcacatccctttttgccctaggtggaaaacataaaagactaagatgcatcattaatcatgcagactgtctgcagcaacactgccaagaaaatgatcatcctcgtaccacccatcaatatccctgacacctgtctaagagctcaggtcatgcatatccgtctgcctttagagaagtgtcaatgtgcaaacattgcttcactatttttagggtcacgttaacattattcatcacctacctgtcagttcatccaatttgtcatgttgtgcggacctaccggtgactgttgctggccatcttttcttacgttgtggtttttagagcatgagagcagaagatgtttggaaattgtcagaagtgtgcaagacagcaaccagagtttcccccaaggaattactatggctcatgtttaagaaaaaaaaaaaaagcagacattcgaggtccctgtggccttccaaaatttctgcttctgtctgatttcttgtccaatgagttgtatttttaatcaattttattataaagctcacagcatgattccaggaggttaaatcacggctcacaaatgaaacaaaccttcagaaattaggaggtcaaagattgctgtcctgattaaaaacaaaacaaaacaaaaacaaaaaaaaaaaaaaaaaaaaaaaaccaagctgtcagttctgaatacctagaaacatactatacacaagttaaaattttaagtacaaaggctgataaaaattctgatgctgcaccaggagctcatgatggtttgtctcaactgtcactcagcacaactgccacagctcctgaaacagcttagcaaatacattccgatctctgagcagggaaggcatttcaccataggtgggaaaattccagaactaggaattaacacatctgcgcttcgagccactgccctgcagtgatgctcaggggaactgtgggagctcttgccttggatgtttggctccacgagtcttagttttttttttttatcagcaaagtgtagatatcaaaagatctccaatatttgtttcaggagtctatcttcctattgttatgtaaattcgtgacagatataaagccacagaatgaattgttctgtctttaaataattgtgaccttctctgagatgtgcatgaagatgctggaatcaggaaagtaattggaacaaacagccctgttgctggcctgagctcaccaaagtgataagctcaaagcctggaagagtaccagctcttttcagtcactaccaagtggagtgagtttagctgtgacacccatgaagtaagctggctattttgtagctgttgatgtctaggactaggaagcaacagatataacaacatgacccaagagctacaaaatctgctcatatggaagataaatgccttaaagaaagtataactttgttagctatttgtattcatgagaacattagagaatgttttaaaccagttctagcaattgaacccaggtctatgtgtgtctacaatttagctacacctctgggccctcattagtgagaatcttatgaggattgttcagtttatcactaagactgaaaatatttgctttgcctttataaaaataagaatgtccaggaagagatgatgatgcctaagcctcttgttaccttcaaattcagaatctcatacaacactaataaatacttatactaaatcataattatgcagatggtttctctgacatataaaaaaataaatcattaaagaaatagggggtttgaagccccataggaggaacaacaatatgaactaactagtacccccagagctcccagggactaaaccaccaaccaaagaatacacatggtgggactcacggctaccgctgcatatgtagcagaggatggcctagttggtcatcaatggaaggagaggcccttagtcctgtgaaggctcaatgccccagtgtaggggaatgccagggccaggaagtgggagtgagtggattggtaagggggaggaggggtggataggaggtttttggaggtgaaactaggaaaggggataacatttgaaatgtaaataaagaaaatacctaattaaaaaaatctttaaaaaagatagaataacaggaattagtatttactctgcatttacattatattatgatctgtggacagcatgctgccttgctccttctgagtctaccttcagagtccacagtccacaaaagtgtcttaggaatgagcaagtgcagctcagcctgatgcagcggaactgaggagacctgtggagtaacgtggcccacaataagggcggccaaaatgttgtcttgctttttggtttggtttggtttggttttggtttggggttttgtcagtaccaggtttacctgacagagaagagaaaagagcattgtgaaggtggggggcggggcttgaaagccaaggaaggttgatgaactagagggttccaagactggcacggggtttgatgcctctgtgatatggcatggaggagagggcaaaataaaggtaagcagaaatggtggtttgtaggtgagccaagcctccatcattattcgtaataaatgtgtaaatatattctttggtagggggctataatttaaaaaaataaggaaaaccaaccgggcatagggaagaaaggaacacaaggcaaggcagatgaagaaagcctggtagaataaagaagattggctgtgttgttgttgataacagagaagaaaatgtattttaggtggacttaggatgtatgtttaccagatttgctgtctagatgtgaatgcctgtatgtggacaaaatagtgaatcacatctgatgtgttcctttggatgcatcaacacagagatggacctgagggtctgcaaggagaagaaaggaaaatgatgatgtggtgaccctccaagggaggctgaagctgaaggattgataaatgccttaaagaaattcataaggaggataaatgccttaaagagattgtaactttgttagctatttgtgctaatgagaacattagagaatgttttaaacgagttctagcaaaggtggccccagaaaaataaacagggacctgtgggtggtaaagaagagtcctggaagctaatagaggtgggatcctcagaagctcctgtcattggcttctcccctgtgtcctgtttcatgtttttgtctctagaataaaataagtgctcatttcattttaagtgttaggcctaaaaatatcccttttgttctaaagcttgcttttatgtacaattatgtctataacttactatctgtcgtggctgttctctgtgtgtggagccagagccccccccccccctttgccttcacactgttgcagtgagcctgctgagatctcccagtagcctgtgcctgcattccagacattctgcaaatggcatgctttagttttcccagtctctttaatgtgaacagaattttgtttgtgcatttgtggtttaccttttattccttgtcttctttagttatcattcaaagtccatgagggcaggaaagccatcctgttccctattataaatgtggcacctagaaaagcgcctgatgcatggtcagcaccttacaactattccatcaagaccaggggtcattgctctagaagcagaagtcctcatataaaagtaacctcctcttgttttcctcttatgacatttttacctgtattaataaaatttcaaaaattttttgtgaaaagctacacaaacagaagatgtataggtgtgtgtatcataaatttatagatacttttttttaactcctcaaaaaagaaaaagaaaaaaactaatggattccagtttgggagtttaatttctcatctcttctggacatttaaaaacactttaagaacaaacttttatagggaatttaattctgaacattgctttggaagtaataggaaagactgtttactgaaaggggaagaaagagaccttcatatgcaaatgtctggcatttgaaaatgtcatatagctacatctacatataaataagatgctctctgaattccagggaagggagactttgtatagcattagccaatttctatatcacagtaaagtgaaactaataaagcagcaatgggtcaagaagtgggggagagagcaaatctccactacctctaacagcagcagcactccgggtcaaagaccaagcagacagaatccgagccctgatgaaatcaaatcctacgcgcttgaaggataatggagagcagccagctagaagaaaagggacacagatcaggtcttgacaactccctatcacgtacttgctctccttctaaatattgacatggaaaccaaagtcctctgagatcttttctctccaggctgagagatgtttttcttaacatgaagttctaaaggttgaacaacaaacaaaacaaacaacatcaaaaacaaataaacaaacaaacaaaattccactttgacatctttccaatttcatatgtattccactgccttctaatatagtgctccctgactatagtggagtcacagggggaaatgattaataacataatttatgttacttttactgaccatttatttcatggagtccttgtagaacttgtaccagcgagaactgactggagtctatcagccagagcctgtaccaaaatttaattttaggtactaagataagtagaccaaagccaaccctggctcctacacaaggtaatttatacaggagctggtgctgagagaactagcctcgagaaggataactgaaggcaaatgcttgaattttagggtagaaatctattttagtaagcttaagttagcagcaatagggaagaaaagagaaaaatccaattgtcaaagaaaaccaacaaatgagggttgtcctaaaaatggatcagtataatcgttaccttcctgttgaatatagaaaactgtttggcaacttactagtgtttctctttgaaataaccattcaataaaaaagttattatcaccatggaaaatattttaaatgtagaaccagaaagttgaagaacctcatctggggacatcttctgttggagaagttgagaatatgtacaaatagtgttctctctagctagagagaagtctcattggcccctaccactcctgcctgcattggggcagaaagagtaacaggaaaagagagaaatgcacattggatacatctgaaaatacacagtcccttgtggcagatattaaaggagccaaagcaagtccctaatgaggattaaaaatatcatatcaaagaacatgtttcaaaaactaaaaaaggaaaaagaagtggagaaaaatttgttgactttctgctaaaatgtgctgacatgtggggatatttatgtttttctgaacatctggtgcatattagtatgtttttattcacaatcctcaattattaataaaaaaggaaagctgaataattaggacacactgccacaataaatgaatatcatgcatgtctcttcccactgcatagactctcaccataccattaaaaaacatagttatttttaagtagaagaatcagtatattatcttattataacaaatttctatcagaatagaccatattgagtcagcaacacatgaatctaagaggttggattatatttcaaatcatgatcattattattaataatgatccacattatacttttaataatggctaaagtttgaagaacaacctaaacttgatatatacttgctttgccaagatggaattctatttctttaataagactttatggagcagagaagattttattagagagaatggcaccatcacttttggctcctttgtagcctgtcaaattgaagttatcactatctactttataaattttggttaaccttcatttcctattaaggattgcatcagctacttgtggctattttaagaacccactactgaatataactgagtcctttccatcaattgcaggtagccagcagtgacacatagtccaagagtggtgaaggctaggacaagtctggcagtagacagcaggttgtccataaatgatcacagaactctggtagcagaccactttattagctcttctttccgggcactcacaccacacaccctgccttcatctctttgtctgtgtgcagagatatagctaattaccctgagccctgcttaatctcacatgatttcttatagattcgtacactattctaacatcaaataaccctgcttctcatttggcaaactcttgttccagtttgcatgtcatctttgccccatgaaggatgatgtgttgaacagacacatttacttgccaagtgctgtatgctatgccaacgtgtaccaatgcatacctacatctaaaatctcactcatttaaaacagctataaagagctgagtactatggataagaacttgcctatagtcacagtgctgagagaaaaagatgagaaggccaagcaaactccccaaacattttcaggaggtactgctaatctggagggtagcataaagggtttcattgcagcatgttcatacatttgcatcgtagtctttttcgattactctgttcatgcactgccttccctgtccccctgctcactgtgtctggtttctctcctccctttctactttcacatcgcttgtattgcattacccccatcccccatagtacttcctgctacctgcccagttgctgtttggatcctcgaatgaaacacatgcacacgcacatgcaaacacacacacacacacacacacacacacacacacacatacattagcttattttgaaattcctcccttgtctagcatgcttttctctccagtactcctgactcaacacctcctaaatctacttttaactttgctgccctattaccttctgtgaagcccattgtgttttgctactcaagacacttcttggcagcccttcctggggcagcttccctttcctcctaggtttcacatgatcttccctctgcagccctaaatctgatctctctctctctctctctctctctctctctctctctctctctctctctctctctgcaattatccttctcctcctctctgcatcctagcctgtgcaactctacgggccctacctcatctctctttgccctactattggctgctggcttcttttttgattgagcacaaaccaatcggggacaagaacctttagcatttggacacacagattccctattaaatcaaaacattagaaccaatctcaaataatccactcttcctcctgctccactaaaacttatgccttctttctcataacattcacttctagttttctccttttccccatgtcataagctcatatttatgcatacatgcacatatatataattttaaatctcggttccatgtataagagaagccatgtactattggtttattacacttaacatggtgacttctagttccacccattttgttcacgtgtagttgtcttttttgattgcatgaaatttcattatgcatatagaccactacatctgttgatagatatctctgcaggtatttttcctgatgttgagaatcttgcaataggtttctgctttttaacattcgtaagctgaggccttctgttcctcaccttcacctcagaaacgcagtaagagtccttctatgaccaacatgggcttcctgttttcattctagagatgacaaaacagctacaaaggtactcatgaatttcctcatctcctactacaaataaagagggacacgggcttctgaactcagaacaggagattataatttcattcacaagaaaaacttctctcagggttgcaagacttgactatctattagcacattctcctactcacaaagtgtatcattgcatattaatagactagagaaaacattccttatgtataaaatttcctagccagtgctacaaaatactcagacagttaaatataagattgtacataaggctcttccagcttaaactatgctcttaatttctttggaacactatagcctaaaagatgatgaagggccttcatgggtccagcctgatgtggtagaaagtcatgtggtatatgagactccatacagctgttcctgtgttaggcaaacctcatcttctctgtataatactaatcatctctgtccattgttccaaactgcagacaatgggctctacatcaatattattagcctaaaagtgctctggaaattcaaaacatggcagaaattctaactttccaatgccactagccacacttggactttccaaatacaacatctatttcttctcttccactatcctcctttctcattctcttccttgctctccatctccctcttgacacatcagcagaagaaactctgtacaaggctgtgaggggaacaggcaaaggtctgaatttttaaaagttgaggcacaatgctgagttttttgattataagaaattcttaatgaataatgaaaatctctggatctactaaatctaaacaaataagaataaaaaacttaaagtcaaagagttcaccattacttttcaggtcaacaaaaattacttgaaactcattttttagttagtatatatatttcaaggtaaaagcaggtttattatagaaatctaaacctcatagatttctataataaacctctgatgaatctctttctaggctttttatatttttcacatactatttgtgtacatattcatttctgtacatatatgtagatatgtatatgtgtttctatgtagtgcatataggtatgtgtatatgcatatgtagatgggtatatgtgtatatttatatgtttatgtatgtgtgtatgcatgtacacttgagtgcatgtgtgatgtatgtatgtgtatatgtgtatgcatattcataggtaagcatacctgtgaatgtatgtactggaactgggatccaacttgagtgccattgtattagttagggttttactgctgtgaacagacaacatgaccaaggcaagtctcataaaaaaaaaaaaaaaacatttaattggggctggcttacaggttcagaggttcagtccattatcatcaaggtgggagcatggcagtatccaggcaggcatggctcaggaggagctgagagttctatgtcttcatccaaaggctgctagaggaagactgacttccaggcaactagtgtgaggatcttatgcccacacccacagtgacacacccattccaaccaggtcacacctattccaacaaggccacacctccagatggtgcgactccctggtctaaggatatacaaacaatcacagccatcaaatcttatatttttttctggttgaataatattttatccttctgttacactgaaatttagtattgttattaaatgttagataattttacttttaggtgatgtatttaatgttagtaataactctgcctacacttgaggcttttaattcacagacttcaacagtgtgtagcatattctgtcctaataatgacatcttaagtgctgtatcttctctactaaacactgagcagataaagtctgttgtggctttctaacagccgcagttcttccttgacaagtgtaaaagctgatcacagtgagcctgccacctcagttccctagaagcagatctcagtcatggcctgaggtaaagcccctgaaaaccggaatgggaaaggcagggtagggggaaggaagggggaactaaacaatgtgtacatagtctaaaataaacaaatcctaaaagtgtgtgtgtatatatatatatacacttttagaatatatatataatgttttgacagttttctttaggctgtaaaatttgagttctttcttttgttcttttactatctatgtatttttcctattgtcacctcaatgtgaattgcttttataatgaaaaatatccaatatgctttattttttaagaaaaatatagaactaagcaatttagctctctcgggaaaccaaattcttcatattgaatggtacagtttctattagccagtgaaacacctatggttatgactctacctgcggattcaagtggagtagtaaggcaatctcaaggatctctccaggcaaaggaatacttctgtctcaattatctgaaccttcagacaaaattgttttctgggctgaaattatccacatgactgcttctttcatttttccccctaactctgcatgttcaactctaagacaatccattactgttgatactttaagagaaaaccccagattaaactgagaacacaagaaaagatggatgtgagggctgataactctgttgacaatcttgcatctgaatctcctttaaagtggagtttgagatttacacacacatggcatctgcagctagttactgcttttaacatgcctggccataggcactgacttcatatgtctgccacctccctccaacttatcaaaggtatgaaaagtgtgggcatatgtgagggctgtgtgtgcatctgtgtgtgtgtgtgtgtgtgtgtgtgtgtgtgtgtgtgtgtagtttatagagtagcatatgtatatttatatgtatatttatgtgtgaaaatatttatatgctttatacattaactatcatgtgaaatgctgcagtctttgtataagaatgacactttaaaagcattaaattatcataaaataacaatattacttaataatcttttgaccaaaacatgacctgtgttatataacacaaactgaaggaattcaacagatttagtttccttaaagaatctcgttttcttgtgttaagatttacaaaaacacagagaagtgctttgcttaaaatcattcttcagtgatatttcttcatagtctcaattctcatcatttcatgtttctgactgtgacttttaaacttgcttctccaaatgtcctatagataattaccaatgccctttgtccatttcatatatcatatatctctagacaatttctttaatattaattagtattagatattccatcccctaatatttttcgactaaaaaaaataaattctttccagtttatgcaattctattgcatacatactgaaccataaccataaaatttttagtgttttctcaaaaatcacaaggcattttgagatatttgtattgaagctaaaatatttctcctcaaagtttacatgatacaaaatggaattagttagctatttaaggcaaattttcatcttcatttgtttctctatttttttttattttgagatagggtctctatggtgttttgaatgaaaaaataaaataaaagccctcttaggctcatatatttgaatgcttggcccctagttggtaaaactgtttgggaaggtgtatggctttgttggaggatgtatgtcactgagggcaagctttgatgttttgaaagcccgtgccattccaggcagctctctccctgcctcctgcctgtaggtcagatgtgagttcacagcttctgctcaagtgtcatgcctacctgctgccatgttccccaccatgatgctctgatcctctgaattcgtgagccctaaattaagtactttcttttatataagttaccttggtcgtggcattttgtcacagcaatagaacagtaaccagggcagtctccctctctagcatgtactggtcacagactaatgattctcttgccttaatatccaaagcactcgaatcataagtgttaccacctcctaaagctgtttctttcatttacaacacatgaatgggtcatgcacaatcttcatctaagatatattcataatagagctatttttctcccttcctacccacgtccgagacttagacaatgtcgatcacctaagctgtaattctgatttcctgtttgtctgctgttctctctgagtcccctcattaattcattttctatgctggtaagatctgctagatacttccccactgcccttgaaatccaaacaatgttcctcctcctgatatgtagatatctgatcagagaggatcttggtcgacctcttcatcttccttttgtatccttctcctgttcctatctctccttctacccctccttcccctgactttctctgctctgacagagtaccttgtttctttgccccactttctctatcaggggcactcccttgactctttagctggccagctcttcagagctgttccttatgacacctgaccccacctgactgaaatagatttctaggcccactgttacgtatctgaacatgctgggctacccctctgacatttcaacctggcatattgagtttgggggggttgtttgtttgtttgttttattcatttatttattttgtctgttacctgtctcactgtcgtctcgctgtctaatatgtatgcacttcaggaaagaaactctttgttacttactactcataccttatgtttgtagcattagctacataagaaggaaataagtcaacattttaagagaatcaggtagatgaattatatgagtaagggtgaagttgttgtaaattaagacacttcatttctcacttctctaagatccaaaaagttaaatggtcaaatactaagagccaaaagtcataggttgatattaacaatatcaattaaagcataagtagggctttgggtttttttgttttgttttgtttggtttggtttggtttggttttttggcgtttttttggtttttcgagacaggtttttctctgtatagccctggctgtcctggaactcactttgtagaccaggctggcctcaaactcagaaatccacctgcctctgcctcccaagtgctggggttaaagatgtgtgccaccacgcccagttaagtagggtttgtttttttttaattatttttttctatatactgtttctaaacatattcaccttgtgtttctattcctaaataaatggttgcctggaagttgcaactgtaatgtcagtttttctatttcaatagtccaaacgtatatttgactctacaaattcaaaattgcacatgttttataacgtctattgattccttgagtggctcaccgtgtactagaagactgtaaattatatcctgagtatggggtagacctatgaaagggtaaactagcattgagatcacaaagtagcttttagtgacaacttatttcaagctctaaatagtgtctaggtagaaagaaattattcagaagtacacaacacccttaactatttctagagttatccatctggagttaactagttaagtcatcattggctataaaagtcagaaacaaaccaattgttcaaaactggaaactaaaggagtccctggctatttaaaatacttggtgattatctgcaattaactgtgtgttttttgtctatacatatataaatatatataaatatatacatataaatatatacatataaatatatatatatgtatataatatttaactgagagataatgtttcaaataccaggttatctcaatttgaaattctcttgatcaaatagaagaacaaacatttcatttttaaatgttttaaaatcaaataacagaatattacatgttgaacttttcttaatgaagtagagaacatttcaagttttcttaatggaatacttaaattcttcttaagcaagatatacccaaaagaggtcttgaattttcttaattagtctgagttccgtgtaaaacatcagcttttgagcatccagaaaatatagggctaagctgaacaggcatgccctacatgtgacctagaatccatttgctgaaaaggtcgttgatgtcagtgagcttcttgatcatttatttgaggcaacaaaggtaaaatgtagaaccatttgttctgtggcagagtgaataataatcaatggtcttttttatgaaaaataaataaataaataataagcaattcaaaaaagtttccttggggtctttactgctttactggagctattagaattgataccttcaagacataattttgcaactcaaatgagacgaacaaatactttagcataagcttaaactaagactatcagatacattaaaaaatatctatggataaccaggattctattaagaactatgctgggaaagtagacatgaactaatactctccaggtcacttggcaactggaacattttcattgtctctatgtgtgtattgaaaagtgacttcatcaatgcaagagtttattgttaacaactgtattagtttgctaaggctccacaataaactactacaaacagatgatctaacagaaatgtattcatcacccagtcccaaatgcccaaaattcaaaagtcaaaaatgtataatgggtaacttcaacaaagatctcaaagacagcatctttctttgcctcttccaggttgatatttcctcttgtactagttcataggccaacttctgccgccatcatcatgtgacctactttgagggaacatgctgtgatctagtatagagatcaaaaaataaatgttctttaaagtgtcattaatcagtggaaagatataagatttaaattgaattgtcaaaggttgtgttcaatgatactatgtttctatagcaggttaaccttttagagggacaagtagaaatttatgatggactcttgtagcattataactttagtttagaaagtaatacctccttcaacaacattcttatgccaaacacaaatatgttggattaactggtaagtagtaagagaaatgaaatcaaaacaatataactttccatacattaaactgttcaagagctatactgttcaaaagctattaacaaaatttcccttattttgtcttagagcctattccatatgtttaaaaaaaaacaattttatctagactcctagtgtgaaatggcaaactcgtctttaaaaatactcattgcacaatcagctacatatccttcttaaattgttctgccttatccttgactgcacaagtgtattatcttcttgtcctttcagtgaggaacacttacattaatttagtcacataccatcatatggcaatactccagacttgtaaatgaaactaaatccatgctataaattctcagactgccctttctgggccatgacatcatttagaagaaatatgcagacccatcatttgcttacactagcttctcaattcatttatagctgtccttctttgtcgtttacaattagcagaacagttttgcccttcatgttttttgtatttcactgaagaagactgcagtgtatagcaaatatagcattaacctgtaagcacctactcctgcttcaatgactacaggcacatcattgagcaaaatctttctcccccatattttgcttttccaccaagatagggattggaatcttcagaagaaaatcacatcactgaagtgcagctggttcttagagacagatatctgaaagcacgaatgttttcaaagcctctttcctccatcagggcacagatggttggttgccaaatatggcttttatccctttaatacttactcattcatgttaaatattgagcacccactttgtgtcagtccatgccctaaaccactgagatagcccactgaacaatacaattagactcagaaggatctaatgcaaagctgtattgtgtgttctaatgtataacagatgtgctaatgcattggcgctcaggatggctcaagtgactacagccccaaggccagttggtatctccttgtaccaataactcaatattatgttttatgtatgtcatggtgaaaaacatttagagatgccacggctagtacagtgtcgccagagtgtagactgatggatgggctcgtcgctgctcctcaaaaaaagagggagtgccagctttggtagactggggcctatgctctaactgtttaggaggctgaggcaggagaatttcaaactctgggcacgtcgggattttagaatctgtttaaggtaacttttcgtcgagtgcttcaagataaaatgtaaaaagaggctcaggggtgacattcaaagaggtcctaaattcaattcccagttgtaggagggtagagagaagtagaggggaaagagggggaagaaggaagagaaataaagggaaaaggaaaggagagcctgcataagccagtgagtaggaattctgcataaggcatgacttttcttagcatttcacagtgtaaactagctgtttgtctcagcctaacctctcctagttaacacatggccgcaaatgataactgctctccagtttattttcctgtctgcttttgttcctgtcctcattgccatgtgtggctttatcttttccacagactaactaaacttaagtagctatcagccacgttccttccctgcccattggaaattgaagctctcctaagcattggtatgatctgtaccccttctcagctgtgttcctcattcctattcccaaagggatgctctattagctttcacacggggggtagggggaggtgtcttgttgagctttgctagttaccaaccagagtccttaaagaagtctagactgacgggatctggaaggctttcacagacatcttcacttgttagaggcacacaacatattctttgagtgttggcttctagagacattttaaattgagttgttctggctgttctcctatgatgaaaagggactggcaagctgacagcccctgagggattcttgtgacaaggaagggtgaatgtagggagagaagcagagggtaaacctcatcttgcatgttcacagcccatgactaatagtgactctccatagctcaggactccaagagccaacactgaggtgggacctagaaggtaatcggtatggggtctgacaatccaaaacaatgacgacataggagtggaaacagctgggtaagggcagttgtcttgtcagtttgagtgatagaatcacctagaatatttttttcaataatccagtccccttaatggtgatctgattgggccagaaattaaaccagaaaattccattcttaccaccctaacacaggtagcattgccttaagagagaattatagtttggtatttatctcattaaattttgtatacataaaagaaaatcatgaagttgcattcatacaaagtacatggacagacacacagttgtgtgtgtgcgtnnnnnnnnnnnnnnnnnnnnnnnnnnnnnnnnnnnnnnnnnnnnnnnnnnnnnnnnnnnnnnnnnnnnnnnnnnnnnnnnnnnnnnnnnnnnaggtatttgagcaaccaaagcatcatctaagattctgtgacagccagatactaaggtatgacccacttacctgcattatataatatacacaatcataactgtttacaatttcttgtttaaacagtttattagtatttagaattgagcatcaaacttgaatattccattcaaataatgctaaatggtcataatcattagaagttattttaccactgtgtaagtttgaattgttaatccactttggctcctggtgggttttcctcacattgcacctgcccaagaactctggattcacaaatgaaagacacacacacacacagcttagtttttatatgccttgacttgctcaatggctgggcacttctaaacctccctgcggataatacatactcccctccagtattcctaacttaacaccttctaaatctctattttatctttgctgccctgttaccttttgggcagcatcccctaagggccactttccctttccgtcgacatagctggatgatttctctcctgcagcttttaaatctgacctctctacctccaagtcatggggattcctctctctcctcctctgtcccttgcccatgcaatctaaaagttctctctccatctccctgcccagccattggctgtacagcaattatttattaccagttaaagccagctggggcagggaccctcagtgtctgaaagtgcgacttttgggggccgaattaagacaaagcattagaaccattttccaacaccactaaagttataagcattttagttcctttcggctttgttttttgccaaaaggtcagctgtgaaacagttcccacagatacatgttactcccaaaatattctctcaaagtgcttttgcggctcgactcatgaaagcttactgaagagtaaaagctatacctttgtttcttagttgaaggaataataaaagctctccagttcatgaagagttcctgtaaaaaggctagctgattgctagcctcagtcactgccattattaccaagtctgtcagcactaactgttttggtgtggctacaaatgagaataagtgaatgactgtgtgccgaaataggcaaggaaagcaaagcctggcttctattttgaatgtacatgcctggcttttgctttgtttcattaacagaaatgtatttacttcttgtcactaaaacatcacccttttgctggacaatactatcaacacaaaaaccttggctctaattctaagaggaataagagatagtttactctggagctatttgagtgacccaggaacacaggtttaggttaccccaaattcaatgcttcgatatggaagcaatttcatgaagcttttatagttgtacagaacaaagaaagccacaaatcaaggcaaatttaaaatacattggagagtacatcagaggagcagatacagcaagacagggaggctttcctatgggcctaagatgctacctgatgggattcttagatttggattggtaaagaccagcgctctgctactttactagattctaaaggtttttgcttgtttgtcataagatgtggacaagggatgtatggggtgctagaactagcccaagaaagggtagctaaaactttgaaccagcaacagtccaatctctctacagtactgattgtaattatctaatcagttacttcagattttttttcaggagttttcatccacaataccacaggcacagtgtgactggcacaaaattttcaatgtagttttgtgatatggcttacacatcaatgtcagttctcaatttctcaattgttaaataaaggtggttataaatcattcactttagaaccactatccatgctttacagactcttgtgtgacaatgtaatccttggatgaactgtctctttctctctctctctctctctctctctctctctctctctctctctcgtgtgcatgtttgtctgtctcagaattttttaagatgatgaagataagtcttaggaaaggatttataaaaattagttcaaaagcaggagcctataaaatatactgccaaggaacaacagcatacacacccatacatatacacatgtacacagacacacgagcacacacatgtacacacaccactcaaatattaaagtgctactaaggaggccagcaccaaacagggcttcagaaagaagttagtagtcaactgtatcaaatattccagaaaatgtgaacaactggatgtgaatagattgacaatcaaagccagtactgctctgcctgcccactgcagtgtccctgagagcagctggcaaaaggagtcaagttaggaagtgaagaaagagcataggcattgctgtggagagatgtggattaagaaaaactgcagttttattttcacagtgtcattctatatacttaactgctgatagagcagagaagtgaagacacagaagagcaagacaactttgatagaatccttgagaagacacagggatgggagtcatgagggacctccactaaagccaatggaataaagaagagaataggttgtcagagtgaaacaaagtatctagagtttgcagacagaaaagaaataaaaggagacagggtcagatgttctcctgtgttacccagtccttaaccagttggtctacatgtgatgctggaataagctctgataccatagcctccattgactatctgctatgtaaagtcctgaaaatgtctttggtgtccaggactatacaaaatctatcagtcttccttgaggggctcttacaaggaacatatttttactgtattatgtattaaaacgatgatggtcttattatggattcccaagtaattgtacatttatctattatcatctttatcttaacaattattcctgactgtgtgaagaaaacaataaggtaaacccactgagggacaataaaaaaatcacattttatatatagcatattatgtatagcacgtagcagtgctagacacagcagtgacatgagaaatattaatatgccatattacacagaaagattaaagctgtttagctttgtggtttggattttgctcttgtgttcaagtatacctgcgatacctgtactgttgaagccttcactgtcactgcgtcctaggaaatgctccagtctccatcccatcactctctgtgggatcttaacttcaggtcacagggaagaacaactacattacctgataatgtttatccatttcctcatgcacagcctaaggacaagggaatggctggacactcagctcaggcaggtaaaaatagatgggcttcaccccattgcttctttctgatgtcgtttagaatcattttcagaatggttaccaaaaaaaaaaaaaaaaagtctcactgagaaagggtggccagatctaagcatataaatttgaccagaaatgcatagatttccttgaacataaacgaaatggagatattcttgtcatgaaataccttctcgtgagcttttctttctctatagtttctagtaagctttgacttttgaagagaagattcgctgcagaaagagatagactagcagcccagggggtggggctaaagcaaacaagtcccataatatcaaggcaactctacctctagatgcccaggagactaataaaccacagatccctgcttcttcccaaggacttatcttgaccaaactgttgtcaaagccatgtgaagttccataaaaacgctgtgtttaaaaggtcatcaagcaaatcctctcaacctctgagtaacccacttgctgaaagatcagctcttgacagaatagtgaagttgcagaaggcacattagagatagaacagagcttctgtctccactgttgctttcttcatgaaagagaactcggccaagtctgactcaagaaaacaaatgactaacaatttgcatatttgctcttaataataagtgaagcattttttttttccttagcaaccaggattttcggttaactctaaatgagccttgttataggaaacccttgaatttcaatagttgtgtctagttgccatagttaaaatattacatataagtggccacccggaggttttacagattcctcaatatttgtctttatgaatacatgacaatcagaaatataaatagtaagagttcagggaaacagctacataatgtctaagtcggggtttctattcctgcacaaacatcatgaccaagaagcaagttggggaggaaagggtttattcagcttacacttccatactgctgttcatcaccaaaggaagtcaggactggaactcaagcaggtcaggaagcaggagctgatgcagaggccatggagggttgttctttactggtttgcctcccctggcttgctcagtctgctctcttatagaacccaaggctgccagcccagagatggcaccacccacaaggggccattcccccttgatcactaattgagaaaatgcctcacagttggatctcatggaggcatttcctcaactgaagctcctttctctgtgataactccagctgtgtcaaattgacacaaaactagccagtacacataatattcttgtattttagttacctggtccacatattactgtatatatttcttcatagattctgctactttttccaattcaaattcagaaaattctaaaagaaccatcagtgctttgcttgagagtgtagtaacatgaaaagtagatttctcctactgtctttaattattttttaatcatgtctgatcaattctggaacaagaaatgattctttccattcccattcattccgcttctacctctcctcatagcccaactagtagactttcacatctaagtgttcctgtaaaacagaactctgttgaggccaattaagagaaagttattttctgctggacaaaggaaagggagctacctctggccttgactagagacctaacattccaagctatctaaaactttagatttaatgtatccaggcctggcagtcttctggctaagaagattatgtcacctcaagttatgctaaagagatggaaggaataattatccttttcatgcgataatgtaattttctttcccagacacagtgtgttctgtgcattcactatatacccaccatgcaacccctttaggtctgccttcttttctcaaacttggcacaagaagacacaatttcttctttcttcttttctgtctcttttgtttgcttgctggtcagatcctaagtgtcctttgtcttggtcctttgaacctgtccactctttctctgaagctacctccattttgccacttggctgcttgtcaaacttccatgcctatctcaaagagccgtctcttctaccctccttctctgtgcagttgccgagacttacagcttgcccactgtgtggtttctcttttaaactctaataaaattgtcctcaatctatcttctgaatccattcataaactctctcattaatgagactaatagtcctcaatgtgtcctcaatttccccagccaccacacacactccacatgggatttcccataagcggtttcagttagctttggggttgaggtgggagtaggaggtatgcttaactctcaggggacaatgttgactctagcactttaaggacttggttactgttttcaatagttttgggaagtgtttatttttttccaaatcattcacagagatatatatgctaagacccttcccttacagatcaagagctggttgtatacttgcctctgtcctgctgtgcccagctgtgactcttagaaccttagaaaagtagagcctgttatcatttatttgtctacaacttaaaaagatggtgacagcagctgagcctactatggaatctgttatagtgaaggaacgcacctcatagttattttattcagaattcattcagcaggaacacatttctaatctaaaatcaaccattgcaattcaaactagatatgaggcttcctgccacctcgtgtgtttatcttgaaaagataaagaaaggaaatcatatgaattgaaaatctactccaagactaactgtaatcaacaacagggatagattcagattcgtaatttatttctgtctcagacaatgtaaatacagtggacagttaagcatttttcttttctaagttaaataaaattattttcaaattgctttggagataaggttgtgagtagggaaagattaaaagaaagtttcatgataggtgcaagaatatgaggatttctgtgtgagtttcaccacactgtcagtaaattaaaactcccattttatatgcattcaatacagagatagttgatcttctagaaaagtgtgctagacattgtgagcctacaggaagaggcaggctaaaagataataatctactctgagttactcacatgtatgtgctttccaagatagtatgtgatattaaacaatcatgccacaaattgaatttgtggcattcacaaaatatatcgctctctaaaagaagacaatgcatagaaaagatcactctgtgacaaatcttaattctggccttctcaaaatttaagacattttacactttttcttcaaagcatgatatccccaaaactaagacaaaaaatatttcttttgtttagtatattcaatgcctctttttggtcagtctttctcttaggatataaaaataatatttataataagagtaaatattggttaggagtttatcataacaacatatagcaataacaattattttcagagtttagagaatgaagatgcatgaagtaatctagcctagcatacagtagcagcatcctccacatcaacaaagaaaagtcctgctccttcttcatattccagagactcactgcttccatctactcacatttgcctaacaacagctctggttgttctcccgtgagcaggagtctgcctccctataagatgctttaataaacactaaattctcagtgttatctcatccttagggtcttcccaacttactctaaattccccacacagaatcagttccttcctagggatctttgacccatgtggttgatttatttgaagcaaaagcctgactgaatcaaggtgggtgtgctagttaaggctcctattgctgtgatgaaacactattaccaaaacaacttgagagaaaagtgtttgtttcactgtatgctcccaggtaatagtccatctctgagggatgtgagggcagagactcaaacagggtaggaagccagaggcagaagttgatgtagaagccatggggggcactgcttactagcttggctcctatagcatgctcagcctgctttctcatagaatccagggctgacccccagcccagagattgcatcaccatcctcaataattattggatcttatggaggtattttctcaactggggttaccttctctcagatgactctagcttgtgccaagttgacataaaattagccaactcagtgaaatattactttaaaatattatccaatcatttatacacattatcttcccccaaagggatcacaaaagggagtgcattacacagtggctagtcttcaatctcttaatatatttgacccattcatatttgatcttatagtgccccgcaactagtgagctaaaggaagatgagttgtacactgccaaaggaaagtaaccagagtctctaaaccacttaattcaagtaaaatatataactacctttaggatttgattcgttgctgcactcacagagcaactccctcttgtagacacagatgtcaagaaaatggagtagatcatcagaacaatgaacagaatggtaaacagcatcacactagtatgcccccacttggctttgtaactgggactctcagtttcctgtttcaagtgagcttttcaggatacacagtcctggagagtatgggagtagatgacttgattttcaatacttccttggccagtctctagcccttacccaaataaaggcattggttattcagaaacatgggtgattttggtcaaattccacactgtagtgtttctgctttgaataatactatcttgctttacagatgagttcaccaaatattgtattttccagttggggctggggaagaatgaggaacagaaggtaaacacacaaacacagcccaccccaagcagcatagcctcaagtaggaaccactcagttcgactctgttacctttctacccgctttaatgtgatctgaaataagataaggccttatcccattctctctgtccctttagctttccatgtctgtattcctctaagaatgccagtacacataactgtgctaaagaatagacctcagtatttcttcatagttgttgactagcagtgggtatggggctatattatctctgcttcaaacaaatcaagatatacaggtggcaaccttttagaagtgtcaagttctctctctgaattaaccatgtataaacatttacacagaaaactgggtgctgattttatcggagacacaaggagtttgtaccatagccacaaccttactagaagacagtataatacttacattaaatatttttaaaacagaaaacaaagaactcaattctaagctgcgagccagtagaagaaagatgtacactcccgaagtatatcatatttatacaatttcaaatcttcaaatgctttattgttgcttgaatatccattgtatataacttcaggttcaaaaacatttaccataactcatacgtatatctgtttgagatattagatttctgtgtttctggttgtcttaatatacttaaatattatttctaaagtctgtctattacatcactagattgattatatatttgagttttccgtgaactggtttacttggttgaattgactataaatcccttgacacatattgatgactgctcattttcttgcccagggattgtttcttttactcatttattttccaatttctctgtttcttatttgacagtatcacatgagaagcaaaacagagcactctaagtttgcaagaactggtataaactaattagcagattttacgatggagactattcccttcccaggttatcatttggcttagacagtaaacagagaacttagcacagcaaggcaataccttcattcagacttggtcctgtttagcaggtggacttcaagtcaagattgtggacgttgttcaaatagagaaactgtcagtttaggtgtgagttacaatataaaaataacctcaagaatgggttttgagttataagaattcttggtcttccattgttagcagaaagaaaaccacctctttaataggataaggtatattctgatagacagaccctgtacacctggagttcaggtacgtcagagagaagctccccacacacaggtgtgcaggagcattgaggtgttactaacgaacaccaaagagaagtgttgaatagtttgttatgcgaagaagatccagaaataagagtggaaatcagtgctggctcatttcatgagccgtgggactggcaacccccactgcttaaaaatcctctttaaagagcaagcaaatgaattggctattccagttgttgccacctggacccagcacaaaataagcctactcttctctgtggagtcttgaatatccaggtcattacaaggtgcatctaaatacaatggttaccctgattctattttgttcagaatttactcagtactttgtttctggagattgttttttgtttttttctttcattttcttgtgtgtccttattataagtttaatttgctacctaaaaaaaaagggcaaaaaaagtaagcaatacttaaaagaatgggagaaaccaaaacaaccccctataccctcccaatctcttctatggaaatagtttatacattctaacattaatggcaattttctatgtagaaataccttcatgcaaaaaaaatcatcaactacaacatggctaaagtgacacagacataaaacaaatgaggttctgaaatgtcacccaccatctacctatcatcactacagcatataccttataaatttagggatagcacatgaaatacttcccatcagagcaatatacataaatatccccacaaaagaaagcactaaatattttaatactttgcttcaaactttaatgatttgcagatggcatctagatcttaaaatatatagaaagacactttacagctctgactaaatataaataatacattcatctaattcatgaatggcaaagacacgtccttctgctgatgaatatgctcatcatccatgactgccagtgacaattataaggatacactacaataaaacacagtgcccctgtgtagagataatgggaagtaatccattccatgaaaacagtaattaacttgcaatctttcattactgctgaccagttacagtggtgtcaaagaacacttgctgatgcaaaaatacagattagattggggttgataaagttgcatttctcagttatccaggcaggaattgttaaggatatcagattttaaaagagacaatgaaagcaaaactctgtgtgtgtctgtgtgtgtgtgtgtctgtgtgtgtgtgtgtgtgtgtgtgtgtgtgtgtgtatctgtaagttctgtgagtgtgtctgccagaagataatattgtgcatcctattgtatcattgtgtgccttactcttttgagtcagagtctctcattgaacacagaacagaagtgcaagctcatgagcccaggcaattctgtctccaccccacctggacagcacttacatgcgtgcacatggccacacctagctttttacattgatgatataagccaaacccaaatcctcatgcttacacagcaagcacttttacccactgagttatctctcccacccagagtgtctaaaactataaaacaaactcagaaggaattgagcaaccacttgcttggagatggtatcacaaatgtgtagtcaacacatttgagcaaacagaagcccaaaagcacttacaggttcttataaaagcattggaaaaaaaaacttactaatgacaatggaagtggttcactttggaatacaaggtgtttcatttttcttaagtttaatttcacaaattgttcttaacacaggcaggttgtatacattaaagtaagcttagagcatttaatatgtactctgtggctatcaatataagtgatcctaaaacaacctttcggttttcaattacattattgtggcaataaaaaaaaatgtatggatgttagtaaaataaaaacctcacactcaaattatacaagcacctgacagaatgcatttgttgaaatctgtatgtggtttttaaaatgtttaagaattgaaacagccacatcttaactttcaagccctcaggttcagaaagtatcaatgcatttcagtaatttgcgctcagaaacattattctggactttgaaattcaaaaaatagagggtttctttttggattattttatgatcagcctatagtctctatgcaagtaaaattaaagctgtctgacaactcatgggcacatcagtcgctgttaaagaagtaggaaattgcgtaaaagcatgaaaagcactgggtaattttgcagtttcatctctaaacataattgtaaggatgcctgcctttcaattctctccccctctctcttctgaagcatggccttttagttcttgcccttttaaatagctttgcctactgtcactttgcttgttaatgcacgggttgatcttacccagcatagaaggtatttacagagggtacttgcttttatctgtattcacagagaatgctaacaaattagaagaaagtgccagagaacaccacataccttgcccagaacattataatggtttctgcatgcatgggaagtgtgaacactccatcaatatgcaggagccatcttgcaggtaacattttcttttttaaacttttaaagagcataaggtaaaaatgtagaaactagcttttatgagctagtggaagtggtttatattctgcttaaagagggggcagcagcaaaatttgtctctcctatacagagagagagagagagagagagagaaagagagggagagagagagagagagagagagggagagagagaggagacatgtgcataccttcttcaatttgtgtgtagcatgccatgctgtccatgatgtatactttaaagggcatggtacactttttattcacaattctttcctctgagtgtagagttgtgcttggcacttctcagtgtttcttgaataagtgagttatcatttccaaaatccttcctatcgcctatgaaacatcatcaaaatggctttcttgggtactcagtctcttctctgtagagcctggtgtcatgagatgattggccttacctccagtttcaagctcagacacaaagaaactgtttgtctggcttcagtttataaatatctactgagtattctatgtctagaacaaacattatgtctgagatggcaaatcaaaatgaaaatatatctatatttaaattaatgtacaattggcataggatgaaataaattgattatgatacagaaatatacaaaaacatcactatatgtgcctctgtctctgcctgcccctctatctctgcctctctctctctctctgcctgttcctgctcatcttttactgacaattgtcttctctacctgtttcctttcacagtatacagtggtacctgcctgttcttcaacaggcaaagtagacatgacagagaaagcctggctgccccttcctcctaaacagttattaaattaaatcctctggacgcacataggaagttcctcatgatatagttacaagaaattcaaagacaagaactaaaagctttccacaagacaatgccagactgatccaatttaatacgttttcacatcacatgttcatttcattatgcagattgaatacattttggtttgaaagctgagggagtgagacacacaattcattatcaaggaaggctcacactagcttcatttgtacacttttattgcctataccataatttttttgaaaaaacaaaattctccttcagaactttatgaccagcaaatttaagaaatttgctgtatgtctcattctaatatttttttcaacatttctcgaacattggcatataaaatgcctaaaacaaatagactttttttttttggtattgtgtcattaaacaataagtaagcatgttaacttaggttaaagaaacaaactaaagttctgggccacaagtaagaagctgttgtcctccttccagatgcgatgctggttacactggtcaacactgtgaaaagaaggactacagtgttctctacgttgttcctggccctgtccggttccagtacgtcttgattgcagctgtgattggaacaattcagattgctgtcatctgcgtggtggtcctctgcatcacaaggtcagtaacgggacttgggcatcacccaagctaaggcagcaggactcctcctctgatcccgagtctgagtcccttggtgaattaactgctcccatcccttctccatgagtcctagctcatcaccataagaatatttgaatagccaagtggagaggcatgggttttcctcattagttttatcatctttacactattatgaggattgtttatgtcctaagcttatttctctttctaatatatatatatatatatatatatatatatatatatatatatattgccaacctctgtttaaagactcttttcttttgtctgcaaaaacctacttttcattctgactatgaaccagcgtatctacctactggaatcactacaccaaatgtgagaagagataatatgtaaggtctaatatataatgtgtaaaaaacactcaaactctagctcccattagtagcatttatatttccaagtagagctttcaaataccatcagtgttaccacacttggtgtaaacaacaatagcttgtaagttcccttcacaatcttttaaatggaatgagaaaggttgtactgtagtaaacgaaaagtctttgatacatttctgaaacatggagtagatatcgcaccttaatagcaaatccctagctcatgaaagggtaatttttacttgaacagggatgaaatagaaagaaaatagagttttcatccagtttcaacaggaaatcaaaccatgactcctgagtggtgtttgaggttcagtttgaggagagatctcttgcaaatgcaagcatgtggtagacaggaactagactctgaacccaatgcatccttcatatcctcagacagccaaaaaggccagtgtagatcctttaaaaaaaaaactgaattaattctattttttcaaaattccagggaagctttgtaaagtttttatcaaatccataagacattaagattctgattcatttatactcactagagaaattctcccaaaattatttataaaaactggaaaataagaagcattatgaaattaaaatgtaaagactgtaatgcaccctggcatctgtattacatgatcttctttaaagacaagtgtggaatctcctcttgaaaaagacaaaatatagctcacaaatccttacctgcctacaggcataaggaaagactattatcagagctcggtgctaccctaagtcggttagagttcattaactagactagatatttagatgcccagtgacccattggatatataaaaataaaggcagagaacataaaaccaactcaaaaccaaaatattctgagcataaaaagaaaagatagagaagaatctaaaacacagaaaactgtgccatacttttctaagcacacatagaaaaataagacttgtattcatattcatacaataacaaattgatggctgcttcatatagtgaagaaagcccaaacttcaatatttcaaaccatgtttccaaattaactattaatcacattttcattcccatacaatattttaaaatgaaataaatatatacactattttaccagaaattgggcatttgtgttataattttgtcatatatttacatattcacttgagtgcacacatgcatgtgtatacatacacactttacaacattgtaaaaagtgagcagttatttcattcattcattcattcattcatcataaatttcatggcggaaatcctgaaatatgagacattctcagatactgagaatacacagctgagtactgaagcaaaaatgacggccagtctgtctactgatgtagctttgcatttttccctgctcctctgctcctagcttctcatgatttgtcttctgcaattgactacctgtgctcagctcccagtctgaataagctctgtctgctgtgtctcccaagtatatcgccttttttctttacttttcattctaaaactaaataaaaccttttctctatctgctctggaggaagagaaagaacacatcaaaaacgttagcattgtcacagttcattatataaatacccccttgtacaaccaaacctttgaaagactttccaggaaaagtgtaaatctatacatttcaccagtatccagggtagattcattccattcattcaaaattagtgccagctgggtccacctctgacccctaagataccactgcttttcttgtgatgtagcaagccttgtttgtcaagatctgttccaaaatacccagatgctagacaatttacagaattatttctagtgtcgattcctcttactgtctgttctttgttctattttctttctcttctgacttaccagtttctccctgaatatatatctctctcctnnnnnnnnnnnnnnnnnnnnnnnnnnnnnnnnnnnnnnnnnnnnnnnnnnnnnnnnnnnnnnnnnnnnnnnnnnnnnnnnnnnnnnnnnnnnnnnnnnnnnnnnnnnnnnnnnnnnnnnnnnnnnnnnnnnnnnnnnnnnnnnnnnnnnnnnnnnnnnnnnnnnnnnnnnnncccctcccccctactctcccctccttctgtctctctcctgtctgttcagaacctgcctttggagaaatatctcataaaaatgagtatctagagacatgttccaaatgagcatcttgtcctgttgagaagctggcttttcagcctttctgccgccatctctcacctgctgagagtgtgactttttagagttgtgtttgtttttgacagatatgtcagccatagcaactacacaagaatatgctcagacctactatgtgtgcgtgtacatgtgtatgtatgctcattcacatattttcctctgtctctcccttagtggtaatagaattttgttaggtttttttttttttattgctcttgcttcgatcattaaagaaatctcttagtataataaaaaatactagattggagattttcagataatgtgaccaaatactagatttttatggaagcaacataattggtgtcaatttatatctctagctttataacattaatataaaacaatgatattaggctaaaccaaagcaatattcttttgcacttaaatttgggtattatcaggtggtttgttctgctgtgatagaatcttaacgtgtagctttggaatgtcaatatagcactcattgttaagacatttatacataaagttgcagaaggcctttaaagtgagctgtgatgagcttgtgacttgcttctttgccttgtgctgagtctgttcatcacacaatataatgaacagacttaaagaataaacagtgaagggcaaagcaagaatatttcccttcaacttctacttctgttcttcagttcttgacaaaagcttaaagacaactgcaaggagaagaaaataataataattaataacatatacatgtaatcagattctatctgtaatcagttttgtttttggttttttttggttttttggttttttggggtttttttgctctaaaatactttagtaatttgtttcatctagagcttcactctttgattgtaggagcaaactttaggtatctacattagactaagatctgtaaactttccaaccttctaggaaatgccccagaagcaacagaattcacagacagaagcaaaatacagggcactacagttcagacaacacaacaagagcatccacacggttaatctagagggagcatgtttcccagtggccggacaaccaacagcttggactacacaatacagtattagagacaaaagaataagacaagatctacacatgttgccttgcgtttgtggtaatctacaccaatgaaaacatgtactacagctatatttgattatgtatggatatatttgaaatagtatacattgtcttgatgttttttctgtaatgtaaataaactatttatatcacacaatatagttttttctttcccatgtatttgttatatataataaatactcagtgatgag

SEQ ID NO: 14 - DNA, 1842 bp, Mus musculus
ccagagggatgcgggcggcagagcgcgagaggcggcggctgggctgcggggcgctgtgactgtccctccacccagtctggtcgcgctcttctcttcggccgattggccgcctcctctccgcaccctggtttctgtctcctgctcctcctttgccccgaccctgttccttatggcagcagctccttgcatcgggggcgcagcttctcagcggactatcctctcactccgcaggctgagcccggtcactggatgttgctgaaactccggagatcatgctctcctttggtcgcagtatcaccgccggctgtccctgccgccgccccctcctctgctgccgcggtccgcgggatgctcagtagcccgctgcgtggcccctgcgatcccgtgttcttcagaagcctttggttgctgcagagttgcgcgaagtagtcatggtgctgtgggagtccccgcggcagtgcagcagctggacactttgcgagggcttctgctggctgctgctgctgcccgtgacgctgcttatcatagcccgcccggtaaaactcgctgctttccctacctccttaagtgactgccaaacgcccaccggctggaactgctccggttacgatgacagagaaaatgatctcttcctgtgtgacaccaacacctgtaaatttgacggggaatgtttaaggattggagacactgtgacttgcgtctgtcagttcaagtgtaacagtgactacgtgcctgtgtgtggctccaatggagagagctaccagaatgagtgctacctgaggcaagctgcctgcaaacagcagagtgagatacttgtggtctcagaaggatcctgtgctacagatacaggatcgggatctggagatggagtccatgaaggctctggcgagaccagtcagaaggagacatccacctgtgacatttgccagtttggggcagagtgtgatgaagatgctgaggatgtctggtgtgtgtgcaacatagactgttctcaaaccaacttcaatcccctctgtgcttctgatgggaaatcttatgataatgcatgtcaaatcaaagaagcgtcatgtcagaaacaggagaaaattgaagtcatgtctctgggtcgatgtcaagataacacaactacaaccactaaatctgaagatgggcattatgcaagaacagattatgcagagaatgctaacaaattagaagaaagtgccagagaacaccacataccttgcccagaacattataatggtttctgcatgcatgggaagtgtgaacactccatcaatatgcaggagccatcttgcagatgcgatgctggttacactggtcaacactgtgaaaagaaggactacagtgttctctacgttgttcctggccctgtccggttccagtacgtcttgattgcagctgtgattggaacaattcagattgctgtcatctgcgtggtggtcctctgcatcacaaggaaatgccccagaagcaacagaattcacagacagaagcaaaatacagggcactacagttcagacaacacaacaagagcatccacacggttaatctagagggagcatgtttcccagtggccggacaaccaacagcttggactacacaatacagtattagagacaaaagaataagacaagatctacacatgttgccttgcgtttgtggtaatctacaccaatgaaaacatgtactacagctatatttgattatgtatggatatatttgaaatagtatacattgtcttgatgttttttctgtaatgtaaataaactatttatatcacacaatatagttttttctttcccatgtatttgttatatataataaatactcagtgatgag

SEQ ID NO: 15 - protein, 374 aa, Mus musculus
MVLWESPRQCSSWTLCEGFCWLLLLPVTLLIIARPVKLAAFPTSLSDCQTPTGWNCSGYDDRENDLFLCDTNTCKFDGECLRIGDTVTCVCQFKCNSDYVPVCGSNGESYQNECYLRQAACKQQSEILVVSEGSCATDTGSGSGDGVHEGSGETSQKETSTCDICQFGAECDEDAEDVWCVCNIDCSQTNFNPLCASDGKSYDNACQIKEASCQKQEKIEVMSLGRCQDNTTTTTKSEDGHYARTDYAENANKLEESAREHHIPCPEHYNGFCMHGKCEHSINMQEPSCRCDAGYTGQHCEKKDYSVLYVVPGPVRFQYVLIAAVIGTIQIAVICVVVLCITRKCPRSNRIHRQKQNTGHYSSDNTTRASTRLI

SEQ ID NO: 16 - DNA, 245531 bp, Homo sapiens
  misc_feature (1)...(245531): n = A,T,C or G
atgagtgtgcgggtagcccaccctgaagcccgagcttctcatttgagccatccccgcctagccccactcgggccagcgcctggcgagcgagcccatctgtggcttccgcggccgcctcctccttgcatccttgcacctcctcgtcgacccctccctcccgggacctgcatcctgctccaccaatcagagcccgactgcctcttcccacgtgaccccgggcgggctgaggacctgctgcttcccaaacgccagagggatgcgggcggcagagctcgagaggcggctgccgggctgcggggcgccttgactctccctccaccctgcctcctcgggctccactcgtctgcccctggactcccgtctcctcctgtcctccggcttcccagagctccctccttatggcagcagcttcccgcgtctccggcgcagcttctcagcggacgaccctctcgctccggggctgagcccagtccctggatgttgctgaaactctcgagatcatgcgcgggtttggctgctgcttccccgccgggtgccactgccaccgccgccgcctctgctgccgccgtccgcgggatgctcagtagcccgctgcccggcccccgcgatcctgtgttcctcggaagccgtttgctgctgcagagttgcacgaactagtcatggtgctgtgggagtccccgcggcagtgcagcagctggacactttgcgagggcttttgctggctgctgctgctgcccgtcatgctactcatcgtagcccgcccggtgaagctcgctgctttccctacctccttaagtgactgccaaacgcccaccggctggaattgctctggtaagtccagaacccccgtccccgaccctttaactccgcagaagaacacgcgtatccagcacagaccagcctaccctagcgcgcctcctcagcccctcacctcctactgccctagacccctaataccacccacctctatccagagaaacaaggggaactgttgcaggcccgggggtgaggggtggttctgggatgggcagaaagtgcaggtgtagcaggaaacctttgcatgcttgcgcttacattggagctgcgaggattttgagaaatattaaacgggatggttttctgggttcactgttttgaaagagcaccaatcctaggggaaacactgaaacagaagctttgtcatcattaaagaaaaaagtcttactaggatgaggaagaaataactttatgagaaagaatgagcgagaaagcaataaatcaaatggtgactgcaggggaatcgctgattcctggcaaaggtgccatgaggtcgcactggtctcccgttgaagaccaggtcacacagattctagaggagctgggtttcaatagaatttctctctctctctctctctctctctctctctctctctctctctctctatctatctatctctctctctctctcattcccttctctcctaggcggcaaaagacattggttttgcagtccagatatgcccctctctttgcttccctaagcttcaaggtagtacaggggagttgagaaaaagaacactttgcgggtctcccaggccggagtgggcatgactgaggctggtcaggctccatgtaggcgagccgagggcggaaccgacttcagtgggcgctgactcctccatttctggacaggcttctgtggagtgggtcaggcactcttcttgctcgctcgggttccttcagattctgacggcgaacgcttggcaggcttcgctctgctgaagcttcctaattaaatagggccagaggatgggagttgctgcactcctagctggcatagcatttcggtttgacagcctgtagtatactgggcagaattgtggtgtaatttccttggcattttaaactccgttaacatgcctgggtattgtcccctaggtgtggtctgttctagttttagcaagtgtgtatgtaatttttcatcttctgtgaatataattttgctgtagttaaatctggctctgaataaagtgtctttcaaagatgtatataagctgaagtgtatgtaactttagagaggagggaatgaccaactgtaactcagggtgaaagcctgtatagttcctagttattactgatgtaaatgccaaaaggaaaattattatgcatcattctaatttatcctttacaaagacaagttgagatatgcaaccctattagatttgggtcaatagattgttctcttttttggcagtttctaaatttggcattttaataaaactcaacatgtttctataacttcttgattcatgcgtacatgtgtgttgtttttgaaagaataagtttcactttgctattgcctaatcactttttagatgctttattatggtaataattatgagcctgcaaaaacaatttttggaaatgttgatggctttgtagtccaacacagactggtttgcttcattcctagcccttgcattgttttaggaaataactaacttaaatgtgaagttgacatttgcaatcaagaaattacatatttaccagatattttaaaggggactgcataaactaaagagaataaactggttttgcagataggttgtcaagaacttggcaccccgcttccacccctgttaacttagaggtgatcaatcttcatttgagccaaacagaccatcacagaaaacactgtgcctgtttatctttattattgaggctttgtttcctctttgtctggatacatttcaaataaggggttgtttcagtcgttgaagcaaaagaacaattaaagatgggaaaatggtaaaagggtattcagagatcatcactagctcttttccaaaatgtggagttttgtggtcataaatattgtccacctaatgagcaaaaaataaaaataaaaaaaaaacaggaagcaaatgttaagctttcattcaccactgtcagtattaacgcaagctttaaaaaatagcactatcagaaaaggatactaaaggagaattgactagaaaagaattgtggaaaatggaaacgaatattgatcacttaactagattttgaggttatcagtagacagtgaccttgcagtacagctatagttgttggatttaaaatttaggacaagtattttaaagcttcaaagtagtgcttttttttgttaaaaatctgtaagatgttttaatgactggagtgttctctttgaatttgaggttatgatgacagagaaaatgatctcttcctctgtgacaccaacacctgtaaatttgatggggaatgtttaagaattggagacactgtgacttgcgtctgtcagttcaaggtaagaagtcttatatttgcatcttctaattcattaatgagactgcaaagcaggaatcttcctttacagcctatcacttggaaatttatagctatgcaagctaagagggaagctggcaccaagcaaaagtactagcaagagagccaactgatgtcaagaagacatacgctttttggagaaatgtatatgccaaagttataaatgctgctggaggtagaaagcttcaggttgtgcttttgggatgtcaaaggaaaattatgtttctctgacccttctagcatcactttaaaagtgaattgactggggataatagtcaaaatagggggtaagaagtgtggacttattcttttgttctttttgattggggctatcatctttttatcttattgctatctgttttaatggtcttggcctttattatccttgcaacctgactaggtttttaaggtaactccttattagtgtaacttcaacactttgttctaatttggaaatcatggaacttattaattagtgtatatcagctttttcatagataccacactcaattagaactgaatcccctaggaatccagaagagcatttagatccacaagtcattttatgaacatcaggaaatgtactttttcttgtgttaatttcttttaactaacaaagagagaaagaagttgcactactggcatgatcaaaactgggttattagtatctattaaagatagaacttttagtgtcattagtatagtcattagctaacaaatgctttccaccatgtaagttataaaacttttcctctcaaagtgttcatataatcatgcagaacttcaagtagcatggatgttgtactaatagcctatatttgcccttgagtattttaagttacttttaaaaatacttttaaaatctgacaatatgactcaaccaggaaatatgcacataaacaaaactgtatgtgagataatgaaaacttttctaagattgtaagaataaaaaaagatatagaacaaataaaaacaataaactcaaatttagacctagatatctggttaataagtaatatttagaattattgatgaaatttaaatattttagatggaattcaacctcccactaagaaagagaagagaattcacatttaaataaagtttaagtggcttttagaaatgctaaaaccttcttagacattattttattctttctaagaaacataataagacaactgatatttgtaaagtgcaccacctcctggtgggtaagtagtgctctgactgtacagttttttagaccataccatagtgtcagaaacatattcttgcatatttaatatgcatgtaacgtcaacttctaaggtctgcagccacattaaacagtgccattatgtacttccaatgaactacatgagagagatagagtatgagaactccccaattcatacttacccaaatgttaactaaacaggaaaaaagcacagttggataaatcattaattaaagtcccagagaattttgtgaattttttccttctttccctttgtgatttccataaatttgtcttattttcataaccatgggtagacaaaagcaatgaactcataaaaagtatcaaatgaaccaggaaaaacattcctgaaatgtaaagccatggttctaagatttcaccaggagaaaaaaaaaaggggttgacagaactctaaagggatgaatgctacgaaatgaaaataaataattttcttattaaaggaattgttttcattttataggtgccacagaagattttggtaaaacttttatcaacaaaaatatttgtgtttttcatacattggccagtcatgtttgtcattaatttaaataatcgttaagtggaatagatgggggagtggaaacgaatgcaagtctgtgtaagaaactaaaatgtaaattgtttttttgtaatccttgtggcattttaaatgtactagtgtactactactgctattagtttgtgctttgcaatagttgtcaatctggcaagaaaaaataaacatctccctagtggaaaatgtagactttgcacataccaagaatatagagtggctgaattaagctgaaaatcaaagaaaagtataagttgcatgaagaataataaataggatattttaagctaagagtctcttgagtccatcttttcccaatacatgaatttgagtttttggtgtttgttattttagccctagtatctgataaaaagggagaggtattgaaaatctattttcctatatattattctaaacttctgtttctttctctgctgccttttcaggtacaagcgtgcattcctttttttttttttttttttttttttttttggaatttttggagacaagggtcttgctctgccacccaggctggatagtggtgatgccctcttggctcactgcaacctccacctcctgggtcccagcaattcttgtgcctcagcctcccgagtagctgggaatacaggtgcactccatcattctcagctaatttttttgaattttagtagacacacggtttcaccacgttacccaggctggtctcaaactcctgcactcaggagatccacccgcctcggtctcccaaagtgctaggattacaggtgtgagccaccacacccagcctgcaatctatagtctttctagctgagagataaatttcaaagagaaatgggcatatatttttatatctataatgttttcaatttgccttatcactggaacactaaagtaaacattattagccttcacctctcttagacgattttaaataaactgatttctgtccttcagacatattatctcatttatttctcacaacccggtgagataattgttttctccccccttttttaaacttttattttaggttttggggtacatgtgaaggtttattacatatgtaaacatgtgtcacgggggtttgtcgtacatatcatttcatcacccaggtattaagcccagtaattatgaggatgaaaatttggagacagtagatggacagatagatagatagatagatagatagatagatagatagatagatagatagaaagaaaagcggggaggaaggaagggagggaggcagagagggaggaaaaaaggaagggagatacatgcagatatttatagataaccctggtcatgcagtgatcaataaccactttataatttaaaaatatgatgaagccttatgtttttcaggtattacctaattcagatactaaatgtttttatttaataagtcgtgctttagatctacaaatgttcttattagtaaagctgcgtaacagactgcccagtacttagtgtcttaagacaatgaatatttattttgttgatgaatctgccattttggtagggcttaatcgaaacagctcacctctgctctctttggcattagctgatggtgaggggagggaattcaaaggcttggtgctataccgatctgagggttctcactcatatgtctcactgtcagctgaagaccttggttcttctccatgttgatctctttgcacgggcaagttttgtcttcctcatagcatagtggctgagtttcaaagtcaagcatccagagagaaagaaagagccaggtagaagctatatccgttaatgacctagcctgggaaggcacacagagtcatttccaccatagtcacaggcctgtccgctcttaaaatcataatttttttacatttaaggaaatataaatcacagaaaagtaaaaattacttatggaatggccaaaggattggaacatatgcagatttttttaatcttttttcccttttggaagaaaaatataccatatcccaagccattcttcttaagcctttgacaactgggaatataacagaattgacttaacatctgttgagcaccttctacatgccagactctgtggaaggtgctggcaatatataaaacataagtcatacataagcttctagatgctgaaatctcagctcaaaaaacctgtattaatcaaacaagcaataaatcccatgaaaaacttctcacataatgtttattaatttgtagcaaaaatgaatttcatgcattctagtgtgccaagtaattgaatccactagtgtggtgggtagcccattttggaacagaattcttctactgaaaaacacttatttggaaaataaacataagatttttaaaacatagaaaaatagaatcactttctcccctgagaggaagtttgtacaacacatacgtttatggacctaaccatctgaacttgagtcttgtttttcctcttaccaggcaactgtgtggtctttagcaggtcacttaacatctgagtccgtcccttcatctgaaactgagcagtatcatgaatactactaaaaactatttccaataatttggcatattttaatgcagtagttaggctatttcatgcttagggttagcctgtttcctcttgtttttctaattctagaaacgccatggcttgatgttagagttagatgataactctactagttaaaatacatatcatacaaagcaaataatttacatgtctttgtataagtgagtattacaagatatttcttgttttaaaaacatgactttgttaatttcccaaaagttccaggtaagcatttcaaatgggaaaactaggctataaacctgttaaatatttcattgttaactaatatacaaaaggtcctacaccaagacagtgaaagagataggacaacttaggactagactcccactcgtgagctttcatgatttacagcgtgcttccttctggtgttcttcatattaataagtgcaagtcttgatactaagggccaaaaacatcatgccagtaatctacagttaagctcttttcagctctgtagaaatctcccttttggcttgtgcatggaacttggcagctctgtttttagaactgttcgaatttggcttactgcatccctcagaagcggcatatgagcactttatcagtttattcgatattttaagatgcatatcagcattgtgtactagcacttgggagagataataaatactttccactctccactcccagttcactgactctatatttgagtaatctgagaaggataaataaataaaatttaaggatcggagagaagaaaacacggacccaaataatctacatacaaagtattataagcagggatggagatggagattgaaaggtagcccggggcaagaataccaggcctcaagcatgagatgttaactagtccagctagccatagacacattatgactctcttctgtctactgaaaggatcggcaagtctatcgatcattatgtcaccagctgtttccttctttcttgtctctcctccacgtgctcagacaccactgtagtgttcatagatcaacataatcctacctacattctcctgtccctggttctgatcatagcacatttatcaagcacctatccctgcacttgccttgctggccacagttctggcatgagcacaagccacatttatttgtggtctcttccgtactactcattggaaaattcaaatcttacaagcgttttgctcttgccttctttcttggatggtagtggagatgctcaggcctgtggtgagtcagttttcagatgtaaattaaaacaaatttttggaaagctcctggaaaacagtgcttacacaggtatcacctaatcagaagtcagttgctgattgagttaaacattagcaaaagattagtgaaaagctctaatcaaatcagttttttaaatataatcacatacatagactgagtctgggagacaaaaatgtaactgtggaaaagaattactatatagaggacttgcagaatatctagattatatattgtagaaattaagataaagaatatttataaaatatgtgctaaagcatcctgttagtaattatggtcatcttaatatgactgtcataccatttgggtttactgtttggaaaaaagttgatcacaattaccaaaacattatatttaagttgttaataatatatgaaaaagtaaaacttatagaattaggctttcatttcaaagaacattgacatttaaatttgttatgataattaagctattattatataaaggcaaagagcaagagttaaatagttgattaggaataaggaggtttaggtattgttaggaaatagagtaaaataataaatttcaggttttaatcaatcagattatcaacatgttgagaggtgttttcttttgcatacattcttgagttgaggtttatttatgatagggttttaggtttgttatcacatatatttaaactttactacccatctcactgtattattggtttattttgtatgtattctgaactcacagcacatcaaagattcaaatatattaatcaaaagtaaaacatagagtttttaacatgcatctgtaagtatgattttccttacttagtttctggcataggtgagcatatacagataataatcttgatcattatattttttataattaaacaatgaagcacataagtagtagtaatcatgagataatcacatccctggtgtaattagcaggcataggacaaagccaagtatcattaatgccttagagtatgattatattatgatgactataccctgttggttgccttaattttcactgtaatatgtgtacttttttaataatgaggttttttaaaaatgaacttttctctttatggaatatctattaatagacatactttggaatagtcggtaaagtttacttatagttcagtagttgttgaaatttttctctgagttccatagttttgcttctctctagaccatatccacatcaatatacaatagtctaaagaggtataaaaataagtaaatcagtatcttatctgactatttggaaatttacaaggactagaattcaataaaaattcaattaaattcaattaaaaaaacaactaagagttaattgatttctttggcattttggctatatatttccactcctagcacagatagacattacctttgttttttaatagcttgaaattaaactgtattttaattttttccatcaagtcatatgggctacatactaaaaataatattaagtagcattaatatatttattcctatatctttattgtgctacttgtccagtcactttgttgggaattgcctgatcaatttagatgcttatttttgccctatctaaatcaaatgactggttggctaacttgaaattggctttgtgcatctttcaatgatgcccttataaagacttattggacacaattagaatcattgaaaatgaagacaagtggtttcttttgtaaatgattatttctgttcatcgtgtcagagggatacaatctccagtactaactataggcttacatctgtgtgtttcccagtgcaacaatgactatgtgcctgtgtgtggctccaatggggagagctaccagaatgagtgttacctgcgacaggctgcatgcaaacagcagagtgagatacttgtggtgtcagaaggatcatgtgccacaggtatgtgtgtgatcttctttgaaaccttctgcatggattccaaatccaaaaaccatgtctttcatttcttgttatctcccaataaataattcagattatatgttgactagacaagccgtattgttttgttcaaaacatttgttattcttattctttgtcatttttacatttcaaatcacttttgcaagaaagaggatatctaccataaggacactggtagatttaagtacgtatgtcattaaatgaaatacaggcaggttgaataaaagccacatataattagaaatctagatagactgccaacgtgccaaatatggagaaacctgactatgtatgaatacagttgtattgtttatttgtgtttgtttgttttgaacaatagcattatctgctggaaggcaatcttgcaggtttgggctctgaagttgacgtctaatcttagcagctctacaaaatggtcttcttactatttagtagattttattgactaatgtgtttgtaatggacataatttctagtgacatttgtcatttctgactcaattaacctgggattctacaaagttttttagtcatggcttaccaacaatgctataaaggaagtaagaagaaagagtgacttcatgtgctctgtagcttttcaaattttccttgtgtctacagtggttgttagagcttatgctttaaaatggggaatgctttaaaatggggctgagttttcaagttaagcttgatatcaaaatcacatatattgtagaggctgtaaggtgccataatagttgttcttaatggcaaataagcatctttctggaaagtcataattcctgagaatttggatgatataagcatattcaggaataataacaacgtcatcaattataaactttctctaaaaatagaagcagagaatagtgtcatgaaaagtctatttattcaaaagtccctcttagataacaggtatttctaatctagtgtatgatgttaaaagttatgtgctaagtgactggggcagggtggaaaatgagcaaagagaaaagcctcatattctttaaaagattatcttaagcatattgattgttagtaattgataatactaagttatactggtgactacccaagtttctgagaattagcagaagaaagagaatagaatcatatctcatggccaatgatgttttgttttggttttggtttgtaagtagtcttttctcctaagggattatttgctcagatgtgaatgttcttcatgaaagggtggtcaggaggcaagctgggctggtactccatttgtttatttgctaaagcaaacaggtcattgctgcttggtctgtgagtgacaagtcatgaataaaagaaacagcaatatgtgagagtcaatgggcagccttctccaataggaaaggaggaggaccagcatgctgctctcatactaaggatgggggatatagaaagtttgacaaggagcaaactaattatgaggaatcagtcagccataccaaagaaatgagaaatagtactttaggacaaattgaatagaaaaaaagtaaaatcccaggaaccaggaaggatgaaggcaaataccgtagagtattgaggaaaggatttgctttttcaagatcaagatcatggaggatatctgttcttttctaacaatagccacatgagaattgccaggcaattgttataataaacagaccagaagttacggttatggccaatgtagcaaaatctctctttcttacttgccaacctccaagttcttgtcagcgcatataatcacattctcctgattcattcaagtctttccattctagtccctgatgtgctggttatactatgaaaataaatacttagccaagtagaaaatttaatcacaatcgagtaatccatctttagctcattcacatacttagatttctacaggatttaattagtaagccagtcttgctgaatgcatcttccatggacttgtaaatctaaaaggtttttgatctgaataatgacggagagaacaaagtaattttgattaaccaggtctgactgtaaataaattggggttctgacttttgatctaaaagggattctcattcttttctttgtatatttcccatttattttttaatgctgtttgacactgaatggaagtggcaagttgtaagctctaggaataataggcagtagaagatataactttatatttattatatttcattgaacttaatttttttttgtccagagaatggactcttattgtgaaatctgctcaatggtcttaccgtcaatttaactttttgccttgtaggaaatgcattaactaggagctcagatttaggtctaacagcatgacttcttttcttaggtgtttctgtcttactaataagactttagtaggctatttatcatcagttggccaggatgacttatcatataatagaggaaaatcattaaagcctcccataatgatttcataatgatgccatggacttaagtgatcatttttctaaactattccttcttttttttcctggctgtttcatttgtgtcaaatcaaatattgtcttaaggaccatgccccttgaagttttagaaatgcatgtgggaaatacaagctaaaatgctattggcatttttttctgattttccccagtcatatgtatttattagaatactcgtagatgaataggcaagatgtttactatacattttaattattatgttcctgacagtgcttaagcatttaagatatgctactgtgcagtaagcctcaaaatagcccaatcggttagatattactgtacccattgaatagaggaggaatatgcttagcaaggttgaataacatttctctgtcatgcaatgaataaggtttggagtttgtaactcctaagcctttatgcatttcccattatgttcatataagtgtagagtgatgaacaacacattttccttgacttaaagaagtttataggggaaaatttaaaagaaactatatacatttaactaaaatatatttagaatgtgttatcactgtaataccacagtctgttatttagccctgaatgagtataagtaatactgaattaaactttcaaattaatgcaaatacaatcaattaaaatttttgtctgtgaaagtatacaaaaagcacccaagcactgttctgtccaaaagagatggtgttgtgacttatgacagtcagtttagttggtaggaatattctaatatcaacatgaattcatcagtctttcttggtctattatcattaaacagtcaattcttatgattaaaatccttgtttgattctacatttactaagaataatttttatcataaattattttaccaattaacttgcctttaaggaaaagatatgctgatccaaagacatatgtcctgtcacattaatagttaattgattacttgacattctaatataatagtattagaccctataaatttagttaatgtgggcctccaacaagactgacagttcaaactactgcttcttcatggtactgctaatgccaatacatgacaaacaggagggctgctgggaaggccttccttcttccatatttgtcagccttctgtggattttcaaacaccatgcctctttccatgtggtgtttctcaataaagtatcatggaagcaaacaagtaaaagtcatgttttattttaattggaccataaattcttaagagtggcatttggtataagtcttgaaccctgggtgagatttcactgtggaataagggcacatcaggcagagaatatcaatattaatcttatttccctgtattaacattaaaatacataaccaaatgtattgtgaacaaacaaaaatggaaagtcagaaggaagatgatgtctacacttaagaagtagaagcagatggaatcgtaatggttttgatttcaacttgaaattttgtgtgtttctgggaactaccttcccagaaatagacaactttgaccaattgtaattaaaggaaggaaggggagagaagaagtggtgaaagaaaaatccagaagaggaagtatgattttttctgcaagaatcatttagtgaatatctgactttaagcacaaaggcaacaattaagctgtcttctactgacttcaaaaacaaaggatgatttgacacagatggaatcatccacaattgtggtattcgtaaaacatatcaacacccatataaaatatatttctttttaaactgcttttctctctgttcatatgcaatttgcaagaatacaagccttaattatgggtttatttgccacacgcattagactatttaatttctgaaacttactgattgttacaagcatctcatttttaatactttattttgctaatggcaccaaatccagcctgtcaagattaggaatttttcatagccgagattaggaaattttccaaacggggcaataatgttttcgtaaagctctggaataaaaatgatggataatttattatagaagttacattaatagatattaaattaaattgatgtgaatgtacgtttttggattaaatattagtatttttctcaaacaatattattgcagtattaaactaagaaaataaacttgagcttaaaaagtcataaatatttttgaatatgttttactagcaaatataacttttccccccacagatgcaggatcaggatctggagatggaggtaggagttgcctttttacatatttgaagatttactggtggatattattatgtatatttacttatgtatgttccatttcagatatttaagacaaatttcatattttgcattttaggaaaggtgaaaccataaaaaattgtcaccatattaagtacatgtatataccgtgcaaattatttggcatacttatgaatcatactctatctccagttaaccttccttgttcatttgtttgtttgtttgtttgtaagttatctttgatatggataggcataatgtaaaaacttctgaagagaagcatgtaagcatatttggcagggaagaaagaattcatgaggaaatcatttaaatattggatttttaaatatatgacactgctctcaattactaggtgctaataagacatacataacctaccatatagccaaggttttaattatcagatttataatttgaaactgaaggaactttagttcataaaagtgaaaaagataaaatgaagtccaatgaaagtaaaatattatctttgcttccttgattaaatctatagttatttttactaaagtatgatatatgttcccattatttagttttgtttagggaagtatataagatgagagagagagagagaaactttaaaagtttgatctaatgtacttactaccaaataaagattttacctatagattgaaactaaattgtaaatgtcccaaatacttttcccgatgaaattcaaacaaaattagacttttatacacacaaagcaaaacaaaacacaacctatatataatttcaagattaagaaaaacaaaacaaataaaagcattctctcaagaccttgcttcagttgtgtaaaataattaaatgtgctattccaagttgattttagtttttaaatacagaatttgataaaagataagtaaaagaaggccttgggttcagggtggcagatatttagtgcaccctttatctagttcaggaaacacttgaaagatttatcaagtttccttatgtaatgaaagacttaactagttcaaataagcaatacccacagaacataattagagcagcatattggagcacaatttttttttcataaagactaaaactgaacagcagcagattgaaacacaatttttttcctaaagactaaaactgaacagcagtcaagactcaagcatagaatatgtttcaatgtcccatgatgttggacagtcctttgatgtctggacagtctttctctacttctaataaaagttttcctagctgattaatatagtattcccaagaaagcgtccctagaggttttgaaaataagaccttagaatagcatattaaatcttaaagaaaaaaaaaagacaggaaaaaaggcagttcctttagtagatgttttaccatgggaatattattaataagaaatcaattaattttttaaaatgttgcttttgtaaggaaacagtttctatgcaaaattctgtatattttctagctgtttagttttatatgtagactacctaattttgcaaatattgtgctgagactgaactgttccactgtttacccaccagtcttgttaattttctagcatctttaaagacaaaataaaacataccaagaatgtcttcatttctctttctgttaaagcatcatcatttacttttttctgcttgactatcctaccatactgtacttcatatctttatttttctaacaataagatgtgaactttgtttcacatactagtttctagttttcattcattgttattagcacatgcaaatggaaatgaagtcaaactcactcttccctgttgcgttttatattaaaatctttggttcattatgttgtcttgtgatctgaataagacattttttcaggaaataattttaatctcatgaatatgacatgtataacttataccatataagtgaaacatcacttggaaaacactttattttctttctctttttctgttttttaatcactcttcctttcagttagaggtgcttcatagtaacttggagaaaacaaaaacaacttccgatgtttgctttagaaaaaaaaagcatataacacatttaattctgagcttattcttttaaataactgcagttctgaaaattgtggtgatgagtatttgctcctaattgcatacaatttttaaaattagagactgatcaggtttttctcaacagaactgcttgtttttctagtctacatgttactttggtctgtaagactattagttttaattttctttaaattctttattgagggatgccaaaaatgcttagtaactaaaacctaaaaacctagtttagaataacttgcacaaattcagttcacatatccattgggttgtaatcgtaagatatatttgacttgctatctctcttatacagatgatagactttcctctgtatttttgtagaattcgtattaccaaggttttgagagggcagaatcagcttccttcatttttgaataaagcaaaagtgattgaataacttgtgattgtttggctaatccaacaattgtaactagtgattgttctaactaatctctatataacatattctcagtaatgtgtatttaattaataattgggtttacttggcaagcactttggatggttaatagttattttctaatttcttattttaacaaaagttaatataattccaaaatggagtacactgaacaaaagagtgaagggaacaaatttacttgtaaaacatttatcatgtgtgactatcataaatgatatcattaaacttacaaatctaaaatcatgtaaaaatatatcaaatattactttttaaaaattttcctatattttagcgtgaatgaatattacattagtaatgaaaattagacctgattattctaaaaataatttaagcttaacccatttgcacaagggtatgtctgtcatttactgcatttgagagaacatttttactgcaatataaaagggacataaaggttttataaaatttattttaacttgttattgtacattttatagggagttctaaaatcttcaaccattgacctatttattcagctgaaacaattcaaacagttaactgtattgagataaaacacatttactgtgcttccaacatgacccacaaagatgcattctctcctaaaggaaatttgtagagtaataagatacaaatacttcatacaaatcttaatgtttggctgtcgcatttcgctgactgtatcctcttcttttagtgtttaagaaaactcattaatacaaaagataattttgtattattagttttgaacataggacccgccatttatggaactctgtttttgaacaaaaacgtttgttttgaaaggcatctacatcaaataaacttgttggatagattcacacctgacaaaaaaaaattcaagataaactacaactgtgaattgtgctatagggaggtaatatgtggtccaaattccaaagaatttgagaaagtgatagaaagaaaacgattggtgtttcaggtacttatatatggaagtttaatgttgtaaataagaaaacgggtgtgtgtaggagggataataacctcttatccacccacagacttccttaagcaacaaatactgcaggaagaaaaagtattaaaggtgcctcctctcaaaattcagaggtgtgtgggtggttaaagaataatttttaacccctgcttttctctataagtctttcagtcatattataaagacaatgctatgaatatctctattactgttttttttaaatatttatgtattgcttagatctttgttagattctgaaaaataaataagtctggtgaaattaaaaccatattttaactatcaaaataattataaatgtattatcctgctgtacatgagcagaatccacagttaaattttaatatcatcttatgggaagttgtatgataatgtttatagaaataaaatgtatctaagatacacagcatagatacaataagtatatttttatttcatgagataaaaggaagcacggaacttacttatacaatttatatatttatatacaattttaagataattctttaataggttattgttggatatgtacaagtcaaattaaacttatgtttatttgtataaaaaagccttatttttatgtgaattatccagataattgttgttatgataaatttggtgtagaaaatcagttgacatatggtttttatttaatgaaaaaattccagtacaaattattttcatataacattaccaaagatgtccataattaagacatttgcttcatatacatattggatagaacaagaaaggtttacatggcaacacattgtagatcttgggctgctatttctgattatgtgaactgctaaaaactggcaaaaatattttaagcactttgaaacttggagataattttaaaaaaatccttgtctttctaatgtggattttataatatttagtaatttggttgacttgaaggaaggtagtactataacctaggtatttttgcaagatttctggggctgtaaagatgaatatgacacagttctttacactcatggagattacatgtaaattctcttctgagcacacaatggaaaaaattatgattctaattatgaaaagaaaattattcctctgaagaaataaaatgttaaatatactgtaaataacaaggaattgaatatttattccataaaatatgcttgtaaaaggctaagtaattttcccttccatgttgctgtactaattccctctccaaccagcataccttttccacttctccactatcatggtcaaagtctggcaaacacaacatacctcatcatggttgtatgttttgttccccccaccaagcgcttgggctcacattacagccaaagtctgacaggtgtcaattgtaagcaacttctgctgaaatactgatttaataaagaaattctaccaagcatgacacgtctgaaattcttcccaggcaatatatatgggaagaaagcagaaactatcctctttttgctctgccacacctgagagctgctgttctgctggagatgagcgtatagccatctgaacttcaattgaaatcttatctcagctcttcttaggttgaaatccatcttactttctctttacctaaaagaagaacagtatagcaatggagtaatgaaatagagatagaatgaatgaggaccatgtaatggataacaaaattggaaaaatatagaaagcaaacagaaggaggaaaataaagtgagaatgatggaaaatgaaaagggaggagaaagggacctttgttatcagcatggctatagtttgttttcacacatgaatacgtttttacaaataaaaataactttttttttcttccagtagagcagtaatagctctctgaatttctgcacattgcttaagaatgtgaaatagatgctacaaacttttgtctgaatcatccatatgggtttttaaaaactatatataggaaaagaaagttaatcattgtgtgtagtatgatagaaatggctttggattatgaatcaggagatttgccttctagatttttagctgacttgaagaatgcctgtttgatttttgctctcagtttcctgggagattcacttattttgtcagtgaaacagtaatatgtatctataggaaagatgattaaaattaagtaatgcaaataactttgaactccaaaaaattcaaaatgaaattaaaagaatttatgttacctttgctctttattcccatatactataagaatataatttctccgaagggtttaattagaattttgaatcttttaattagtgattttaagtccatggcttaaagtattgatggtgggatagtaataactctaagaatccaatacagtttctagtatttagaagacacagctagctctgactcctgaaagcaagtggaatcactgtgttaatacacataatagaagataaatgcatccagaggaaatgcagttacacaagataggtaagaaataaggaataatgtttaaaatttcaaaacagtacataattattcttaaaactacagtggcaggcatattgcctttatagaaaaccaataaagaagaagtaggagggagtcacaatgtaggagattctgtatacttacaagaaagaatgtttgtgagggcgctaagcattgcaaaatttttcttaggggattaaactttttagaaagagattctttcaaaattgatgggaagattttattacaattctgcttgatgtcaaaatatgaactagctaaatctataagaatccctatgttcatgtataatgatttataaaatgctgtatagtttatagaaagcactattatagcatttattttagtttttaatttttatgaacacataatagttgtacatatttgtaagtacatataatgtttagatataagcatgcaatgtatcatgataagatcagggtaattggggtatccatcaccttatgcatttattatttcttcatgttaggaacattcctattgtattcttttagttgttttgaaatatacaataagtcattgttaactatagtcatcttgttgtgctaccaaacactagatcttattccttctatttaactgtatttttgaacccattagctatcctgtctttatcccacccttttaaaccacagcaacagcttttggatgtgtagatgaagatcagaaagaatgagcactttatgcagtaaatatggtgactaagccagtccttgaacttcaagaaggaaggaaactagtctgcaagattgccctacctcttgtacttctttgcaacaactataccagacatcatcttctatggtttatataaatcatcaattctaccagcagtccgatgacattctattattacatctcctcatccccttcccactttaacttttgattctgaaatcatctgttctactcaatgtaattatctaagttaatcacacacctcagtccatgggacttaatgattgccaactattctattacttttcccctttgtttatctaaccctaatcccattcctgatcttctgtaagtattcactctaaggtatttgagatactttaaatcattgctaaaaatatatataggatagttgtgtaagtagcagtagaaggtagtggtacaaagcacatattctagagctctagactctggatatgatcctggctcaccacttactagccaggctactggccagtacttactgtagctgctgatcctggacaggctacttagactctgtgtttttcatttctttacttgtgaccctggcatggtatgcaggaaagtactctaaagttgagatttgtgcacatgaaacttagggatttgtgctctcaggatcagaatctgcagaagggaagaaagtaagattgggaagagggtgaatttgaattggtgcagttaaaaaaaaaaaagctacacagcgtggcccatatgagttctcaagatgggatggcctttatgagttgtcatcaattggaaaagcagggctgagcttttataccccaccattaatcaccatagatgtgagcagttcccaaaagggagcataccgtgagccaggcagctctcttcagctgcagactggacctggagagggactcaactgtaagctatctgagtgaaatactcttaagtagctgaggagggaagaaggtggacattgcaccgtggtatccactaagatctgtaaaatataaaacaacaacaaaataacagaattcttaaccttgtagaacttatttcttggaaagagacatgagcagtaaacaaaaaaggaaaaacacagattgtcatatggtaatgagtgtgatgcagcaagaggaaagtgatagaagggaaacgagaggttactaatttggggtgatcaggaatgccttggagaaggatcaggagggaatgaaggggcaaatcctgcagatgagggagagaaggacattgcaggcaaagggaactgcaaatgagaaaactctgaagcagatgcatgtctgggatattccaagaacatcaaggatgttagttgggctaaaatgagtgagaagatgcttggttgaagatgtggaaaaagagtgggagtgaccctcaaggccagaaacagaaagttctttttctgggtgagcagggagccattggaagggtctgaaggagaggagaatgttgtaatctgactggtgattttagaagatcactctggctgctgtgttgagaacatgccttgctgaagtaagagagtaagggagaaagcagggagacctgtgcaattaaaaggaaaaaaaagataaagtttcttttctcttgttgtcattgatttggggatcacagtatctcttgtctattttagacattcactctgctactcatctgagggactttgtgtatggtcctttattgagtatattgagaaaatatcctaggttttgctgtagtcaaatctatttttaatcctcataaggtatttttatattggggttttatttaagatatccttcttctttttgaaatttttaattccagatagtatttaaggcataggaatgtctctgcatgctgcagtgcatgccaaattgcattgaatttgtttcaaatttggatttgaaaatacagctttttctttcaatgtactaaatgaacaatacatattataggatatgattttcaatgtgtacttaacaaagagcaatttcattttctctggtaaattacacactcacttgttacagctttgggattttaaaaaatccaggaataaatagaaaacaatatgtttaaataatgttggcatcctggctcaatgagtcaaaccaaaagaattattccagtgcctgtcacttagtaaactagttctgaaaaatcttttaattttgtgttccttgctgatctctctctgaaaagaataaagggagaattaactggatttcaaataatgttggcctggtgcttccacaaacctattctgcagattggttatttaaactgcattcattccaaattaaataatatttcctataaagttgaactttttctctattttcttctaattttccagctgcattcttactcgtttctcctgtaatttgtctgactggattgctattctgtcgttaccttcttttggtgaaggccacaaacacaaggaacatattagtggaatcagttggagagggaacccatttctataattgcatctacaaaaaaaaatggtgtactctgcatatatttggtcctggcaacattgagaagtttgcatgttcttgtgggcattgagatggtgtgaaagtcattacagatatgctgactatcctctccagagaacatagcacttgcataaaaatatgacctttggcaagtagaatttctgacacactgatttaagtggtagtggtggcaactcgttgaaaggacatgtggagctatacagtgtcatcttttctggcccctttgagcctcgtgatatagtttgagatctaatccttaagggttagagagttttacagtgttgagaattttattcagttactcaaaagacaactgtaatagcaacttcaatgtggttatctttaaaatagctgttattttaaaatataattaaagagaaacacagctggcagtttaaaggaaaaaaaggaattagtagtacagttattatactgcatcttaaatagtggggtgatattaaatggttatattctggaagctcatgcccacactgcctttgaagttcaggctgcccagccacattcaggcattgattcaggaaactcccttggcctttcagtaagagagagctcccttatgccagaactgctttgaaatagaatgtggcagagctgtaaagtgggtccaattctacaagtcagcagactctgtggattttccattgtgaatagttctcagatctatatcttcagaccctccaccaatagtatatttcagcccttaggtatctctcatctatagcattggaaaaaagcctcctaacaggcctccccaattccatacttgcctacctaaaatatttcttacttgcacagtcagaatatttacatagaatacttatctaagtatataattcccctacttgcaattcagcaatggctgtccatcatccttaggataaaaattagtcttcccaacaggagatacaaagaccaccagaactggttcagttcctggctctccattcacatcattcattttctctacctcagacttgacactccagtataactttttgttgatagtagttcagtgggatagaccatcaattgattgcatacctccatgctttgctaatgttcttctatttatccaaaacccttcccatgtttttgcttaaacatcattcatattccaagactaaagtcaatgaaaatctatatcaggatgattgtcctcaatcttctggttggactacatgtctctcatcaattatactttgtatcatcagtctgattcattcaaatagtctgtgtattatatgtgcctcaggctaatgactattaatacctgtatattagaaaagaaagcctggtgcttagtagaattttgttaaatatttgctcagctgaaccaatgcattaatactaacaacaaaaagtgtgcttaattcaggtgtgatggcatgtgcttatagtcccagctaccgaggaggctgaggtgggaggatcgcttgaggccaggagttagaggcagcagtatgttatgatagtggctataaatagcaaccgtactctagcctgggcaatgtaacaagaccccatctccaaataaaaccaaaaatttaaacaaaaaaataaaatttaaaaagaaagtgtgcttaaatttctaaatgtttccactcacattcgcatgctgccatttaaattatttgaaattctaaattaaaagctggatatgaatggttttgtgtactaaaataactgtagaagtattttaacttcataaaagatgactgaaaaccagcaacaacaataaaaaaataatggcatgccaggaggagcctagcaaaaatggtttgcaagcttagcctgagagtcatctaataccagtatatgaacttgtgatctacctcattctccaaaagtagtgtgcagaaagaaaagaattgaagatattttaggattctagctagtttgtttgtaattgaggtaattttcacctatatgaatactctattccacatccaaattacttattcaaatcccaaatgactttggccagagaatgtattatttggaattccatttgatgccttcatttaatttgacattgaaccagttgtggggggtgggtggcaggggactgtctttttggaatattcaaggagttataatgatagtaaatttatgataaagttcataaaatttactttaaccatcaaagcatattacttggaaaataaaatgctagatattaattcctcatatctagaaagtctcttacttttgtgagcaaagagaatagaattctttgagcatttgacttttgaaatactcaaagatatatggagagaaaaatggagcctccatctgatgccatggggattctagatcaaatgattttagagtaagtcacatcactgtcagcagactgaaagtaaagactcaaccaacaacgtttcatagaattgtgtctggcgtgtgctatgtgcttgttaaatacttgttaaattaagggatgaatgaatgaactgtcagggaagtgatgtgaactgctaggaatacaattagttgatgcatgcatcaacacggaagccactcttctacttcccagtaattgctaactatgaccctcaacttactgagagtgggcataggaaatgccataatacacatcatctctgaagaaacctgcaaagtgattctgtttcatccattaacttcaagccagatctcctacccctgtcctcatgctcttttatctcatctgtttgcttcacacatgaaacttcagcaatgtagtaatgctctgatcgaatataaaatgtaagtgtagaggataaaaaggagaacttggaaaaagaaggtaaaagaacaaactagtgaagagaaaaggacttttctatgcaaaataacagaaggagaaaggagaaagcagtgatgttcagcattttgtagaaaagttttaatgtttaagtaagggaaaaaaagatggaattttaaatagctgcaggcgtgggtaggctgtattagttttatacattctcttaacatttcagtattaacatatacaatatttactaagtttatgcatttctccctttgattgtttctatacgcccaacacatgttttgagaagaaaataaagaaaaatgtgttccaggcagagattttttttcctaactccaccaccacatgcatatttctcacccatctaaaatagcatttaatgctgccattagatattttattaggaaaaataggtttcgttcttgccagataagacaaaggttgaaatcaatgcttcattctgctgactaggagaattagacagccttcttctactccagtacttttaaaaatgtgttctgtgggacttgaatgcctcaagatgctattctgaaaagagtatccatttaagtgaggttgataaaagcaacatattttgatgccttttcaagagccatatataaggtgaccaaccagtgccagtttgcccaggatttttctgattttagcactgaaaagcttgtatcccaggaaactcttcagttctaaaaaactgttctaaaaaattcatatatatcttgaagtaagaaatatgctaaattttgtttgaaacgtgttttttaaaagaatacctgacaatgaaacattttttcttaagcaataatattaaaattcaaagggattagtcatctatgatacacactttgggaaactctgccctaatcccatccatttttctcctggcccctggagtctctccattttgttgccccattttgcagggcatgtggagcctgaggaatggtctagtattgtaactgcttgagtttcctcctgagccttagactagaggtacttaaagccttaagcctgaaatttaaaataatttacatattgaaaatatttttatcactttgaaatatttctcctttctcaatatcttttacaaatatgtacctgtcttaatgcaaatcttttgggaatttctacaggaatgtaatacattgtaagaaaaatccctaaaaagtctatattccattttccattacataattctggatgagtctttgtatattttgggaagtatgtgtacatttcaaagaagaaagtcataaagagttttgaggctgccatggtatggcaacataggcattccgataactctcttctgagccctctctgtaagaacaattcccatacctgaggggaggtagaagaacaagacaaggagtaagaagcataaaacggaagacaaacaatgtcaatgcttggaaagggagaaaaattcaaattcacagccacttagtttcacttatttttcttttcaaataaccaacagttaaaagtttcatctggctcaacacacctatactcccactgcgtcacgaactagaaacaggtgccttttccttcacctgcaaacagtcataaaaggcaagcccatttcagtgaacacccgaggactgggcaaatgaatgtatgaaaggggatctactacactgaataatgtttcaaaaactgtatttgtttcaactaattctgaattttttctaaattcagagatatttgtctaacttcctctaagtagttttcacctctaaatatctgagaattaaaaagtatgatttctgacatttctagcacacagtatctactgctaatgctgagggagcattctttttgacaaagtctctaattttttttttttttacctcggagacaagactatgcaaaagaaaaatgcagtagttgcctactgttccctggggttattggagaggaaagggagtggatgggaaagtacttcaaatagtatattacttttaggtatgctgctttcaaagggggtaattatagaaacactgacaaagacacatcactgttgttttacaaattttatgtgtgtgtgtatttgtatgactcacaaaagttcatacagcttatcttctcccataattgataagcccagtataacactctagagactaaactatcttgttttaatatacttataatgagtacgtactatgtgtcaggcattttatagccatatgttaagtacttgctgtaactcttcaagaaagacatatcacctccatttctgggtgaagaaaataagagacacagatattaagttatttatgcaacatcaggtagtgttagtggcaaagccaggatttacacccaggctcctggacctccaaagtttcccttttctccactgtctttatgtgtagtctgttattttttaaagtcaaggatttataacagaaaattataaactttcatattaaaatatgttaaatatgttattttggttaaaagtaaggtgtttctattaaggagaaatacggcactagtcatagaaacatctgtgctatttgttttgtgtgatgtgtctttggcttgctagtctcctgcacatgcaagtatgtgtgcacaggtacacacacacacacacacacacacacacacacacacacacacagtttttattcagagtattcattctgctagtatgtattaataacttttatatattgctatatttgtactctgagcattgataacatagcataatattattatactctgtgccaaccatattttagatgctagagatacagataaagtcccaattcacaggaagcttaattcagaagagaaaaaacagacatgaaccatgcaaataaataagcaaaaacatttcagagtgtggttactttttttttttttttttgagacgaagtctcgctatgtcaccaggctggagtgcggtggcatgatcttggctcactgcaacctccacctcccatgttcaagcgattctcctgcctcagcctcctgagtagctgggattgcaggcacataccaccacgcccagctaatttttgtatttttagtagagacggggtttcactatgttggccaggatggtcttgatctcctgacctcgtgatccacctgcctcagcctcccaaagtgctgggattacaggcatgagccaccgcgcctggcctgtaattacttttaagaaagtaaaacagtgatgttatgcaaagttactaggttttgtggtaagagtgagattttcactgaagccttaagtagtagaaagaacaaggtacacaaagatcagaggcagggcattcggagcaaagggaagagcacaggccaatgccctaagggatgccttagtgaaatccagaaatagaaggaaggtaagtgcagcccgagcatagtgaatgagcaggaaagtggtagaagaggagagtagggaagtggtaaggaatttggaatttattcattgcatcatggaaagcctttggaagacagtaatataatccggtttatattttcaaaagattgctctggcatctgtgtggagaatgaattgtagatgaggcaagagtaggtgcaaagaaagcaataaaaagattattatagtggagcaggcaaagaggatcctgacctgaataatatggtggcaacaaaggtggtgagaaggtgacagatgtcctgggggccatgtctatcctcattatttcccattcctttctatattgttattggtgtgaacaaaaatgttacatgccaacgcaaagaaggatatggaaaagggaagaaaaagaaataaccccatcacgtcatttagcactcgccaagttctccatgcccatttaacataaatgaatgtgtaggtttacttttaagacatgaaaatgtgtcataaaaagcattattttaaaaaccaaagcccatgcattgagcctactatattcatctaaagtaattttctcagactttcaagagagaaacagattgatgtacttttggggttgttaactagtggcttttcaataaagcctgagtatattgatgattttgtttttcacttaccttttaaaatttatacaatttaagtaccatcactggtatggcagtaaaaaataaaatataaaaatagacagctccataatttggcctttaaatggcttcacatatttatattctatgtaggatatgtaacagattgtgacaacagaatcagatataatcaaattgcagccttacaaatatagcaaatatcatgaaacagctcccttctgctgactcaaagagtgggagtttcatttctttcattatattttttctgtaacagcttatcactagcaacacctttggagcatttctccttctttgtcagtgtaaatgtccacacaatagcgctttacctatatttgccatcaattttctcacattggattttctactctggagacaactaatttgagtaactggaaatataaagcctatggcttccaccttcagtttcccagttcacagagcaatatagaaagtcacttccagatgcagaaagcccaaggcccacccatagactttgttcagcctccgtggtgctccttagcttatttctctaaagcctgcagattttcatatgtggtatttggggaaaatcttattatcaatatataagcatcactacaattaagctctgcttgttgtgatgtctgaatatcaataaggactccagttcatcctgagagtgacagccatttaattcactctgcctgtctaatcttgggcaaggatttaaaagatgctgtcaaatatttgtaaacatgtcgtgcatttttctttcacagagattcttttaaagtgagaagagttattttctgttttgtcttggattattgtttggtttttaaaagctcatttagcttttcctcttctttaatagtaaattgcaattttttttccccctaagactcacaggagctatccttcactgtattcatgaagtgggagtagtgctgtaccagtagggggcgctcatatcatacctattttgtgggttggcgaaaagtaaattttgtaggtttgtgtagttaagggtggagctattttaactctaaagccaacaaagattatgagttggaatagaagttatttccccctgttgaaaagttaaactttgctaaagttgtaaatcttcactatggtacgagtttaagtggcttttggttaatgaaactgcatgctgtggttgatgttttcagatagcttaatgtggagaatttaaaacatattaaaagacttttttcctgataggtattatcaaattttttaatccataaataacagacacagcacactcacccctgattttaaggggtttctcatatttgtttcatggctgtaatttcatgtaaacatggctgatggtgatgtgagtagcaatggacatagagttcaacttgtttttctggtaagtgtctcctaagtaagtttactttggggtcatttgccttcttcattacattggcatcaagtgtagtcccaaaggcatcaagatcatgattagctaactttcaccaacatcagtaaggaagcagcctgaggcatccttctattcctttttcttcttcaaggttgttatgtttgtcctttgagttgtcagcacccttcaaaacgctctctgtaattttagaacctttaatatggtgaacatcaagcatctcatcatgccaaatgtaattttccacacccccagcatttaatgtgttcacaggaaatgaaaaaagaatcacacttcctctctttgcttgttccttatgctttatcgaacaccattttaatgccaggcacagagtgagagaccagagattaaaaaataaaagatgaacagggcttatcactgcccacaacaaactcatgatctaggcaacacattattttgtgtactggggaaaggatggctccaaagcctgttttctttaacagaagaaaaggacacagttgtctccagactggtccacatgtttaactttcacatcgttcctgactcaagcaagttgactaattgcttacactatacatcccaaaattgaaagtctttaaatttggaagtgcattatgcctgcctttagatggacatggcttatggattcacttatgtcatacaattttcttgcaaactactatgctgtttcaggccggtgaggtggctcatgcctgtaatcccaacactttgggaggccgaggagggcagaccacttgaagtcaggagttcaagaccagcctggccaacatggtgaaaccctgctaatgaaaacacaaaaattagctctgcatggtggtgggtgcctgtaatcccagctactagggagaatcgcttgaacacggaaggcggaggttgcactgagccaagatcacgccactgtactccagcctgggtgacagagcaagaccctgtctcaaaaaaataaaaataaattaatatgctgtttcataggttgaatctgcttggacgctggtatgcaaacgggagggggcaaggggagaggaataggagatgacatgggaagatgagactgggagacggtaaagtgtccccacttccttagggtgagctccacaactgtctagcaattctctagcaataaaatggctgtcctaagattgataagcctttagcgtggcagagtgatgactctagactctcggatttaaagatctctttacttcacacaaggtctctttttctcctctctttcctctacataaactttcttctctgtcagcattactgctgcctattgcatccagtttactataatgcataattaccatgccatcattgctgctgcaaatgcctttttctctgttctttctgcacatccttttccatttatcttatatttcctgttttggaaatgtaagatacatctatatacatcatggtgcctttgtaatgttaaatgtatttttttctaaagaaggtcccctaaattgcaaaagctcaggctccacagagacttagatcagtctctgcccatgggttttaatattcaaatctttggctcaccttccagttgccttgttgtttttgttgctgctgctgcttttgtgttatgattctgtaggtaaattgtttgtagggcttgttcttttcttaatgaatatttttaatatctttttttctcccaggcagtttcttagtccagagttgtgccagaagccaaattttctaatagagcttaatggattcttcgacaattcttgtaaaatatggtatcttaaacatctatcactaaagtggatattacagtacagatattgcaaaaatgtgtttaacagggtacatagaatttctgccaaaccaaatgttgatacacagtattaataggactcacccagcaacttatatttcagccttcacattgactttgataccaaattctttttgaaatctattgagtactctctcaatttcacccaacttggcctcccctccccaaacacacatatttgctccacctaagaggcctaagtctctcaaaattttagaaggcagtcaaacaagatgccctttttccaggcagtaatatcacaatagaaaacatcttctgaatactaaacctctggcagcaatagagtctattcatttcgttgccaaaggaaatggtaacccagtaattatcactggccctattacttcttctcattagcccttgtctcacacaaagcagaagttcaagttcttggttcagactttgagatttccaaagaactggtttggcaaatgacttttatttcttgatcaacattttgtgtatcaggcccctattcaggttctgcaactagagaagtgaacagacaatatttgtgctagcatggcaataagttttgctgaagcagggcaatgaggtgggaaatattaagggatggaagaagactgtttaattatctagaacacttccttgaaatagattaacaagctttcaataccaagcagttagggtaagccattgctcaaagggactactatgacagttttttgtattaccaaattttattagatgttaagtccatacagaggttgaactatatacaatggcagtaaactgaatatgaagtcattaaaaattaagtttcatgctattcttttgggtgtcatgacagtagcaaaactagcgcattcagttcccagaatcacagcttcatcataaagatgagtcatgttgaactaaagggactatattttaatgagccaatctggttactgtagctcatctatgctcagcagcagactgcctggggaacaggagacaatctatttgtcaaatgaagaattagtccctgatgctatccttcggccttgatccccccctcaacactctcctctctgttccttcttgtataaagtcttgccttgggggtttcccttaactacaaataacggtagcataaaacaatctgcattgtgcctgcgattccccatttagcatttgttgacaaataagagtcatcaaatatttattatttatctacaatgcttttagcactgtggggttacaaaataatctttatagaataatctcttggccttgaggaggagtttatagtcctttgagagagtgaaaacctccatacatggaacttcagatcagaaggtatggtctgtagtcattcagaaaaaaatgatcgctcgaccctatgttaggtagtcaatagggagaaccttagaaaggagttgggacatgagttaaacattaaagaatagtttaggtgttgaataatttggcatttttatcattttccgatttgctctctttttaaattcatgtactaaagatttcctattgacaagcatacgatgcacaattatttttattcctgatttcagtggatcattctgtgagttgctgtggttgtttttctagctttaggagaggattaataccttgaatccttacttgtaagtctcaccagcactagaggttttaaagtgtggagtaataacatctaatgtaagggaactagagtggagacaaaaacataggggaaatgctaattttcagtagtcagtgtaaccatgggtaatttttacatgggtttgtgatattctgatgtaaatgctttaaagtagattttgaatatattattttctactgaatatcgcatagtgttattttaaaatttattaggaaataccaactctgtgccaagtaatgaacattactgatggctaaaatgcttggctagcatcagatctgtctagctttattaaaaataataaatctagatttacaaagttcttgacacacaatatatcagagatataatctcaaaaatgtatatccaaataagttctgtcctttaaatttggtcctctatgaaatgataatcatatctgaacagtaataccatcattccatagattttttaagtctgtgtttcagtctttcttaaagtgccagtagacggctgtacagataaatttcttacattattgtgaaattcacatttttatgaagatggtattgcccctgcttgatcatctgcttcataaattcacataacaaacattttgcatggtactcatactgtgccagggaggcaaaaataaatttggcgtggatcctgcctctaaggattgtaccactagtagactaaaacaggtaagaacttggcaaacgaacaaggaaaaggccatttgagataaaggaaacgcacatgaagacatggaagtgcggaacagcatggcattttcagggaacaacagatggtttggcatgactagaatatgaaatgcaaggagagaaagggcgcaggtgatgctttaaaaagtcattttaagctagacaatgaagattttttaacacttaaaataatttcctattatcaaagattttatcttttttaccatagcctggaataaagttatagtgggcttttcaggtatacttttattaaaatttgagggaatagggacggtagaaacaaataaataagcttagaagtgccatacgtggtgtcaaagtgatgtcttgctttcacattaaaaataaatatatatttacaaacttcttgacatatgatatattggagacatcatttcagaaacgtatatccaaataagtgttacacttcttgtgagctattttgttttttagtcacaataattaagaaaaccacagagtacagaaactaacttttatgtgtttttattaagctttaatacttatatacattaacttatttaagatatatataacaatctaagtaatacgcatttctcttcctattttacagatgagaaaactaagattcagagtaaaaaaagtggcctaagatgtccaggttactaagagacaaaatcaatattcaaacagatatgtttggcaacaaagttaatagtttatactgtgttgccactttacctcagtcagactttatctataccatatttgggtttgaacaccttctgttctaaagaaattttaaagttttcgttaaactgtcccaaatgtcaggtaggaaaagttgacactgatttccctaaatcacaatattcatattaaatattctggaggttgccagggaagaatttcatagctatcttatctacaccatcctatacaaactgcatcttggtccattaatcctcaaattatgttaaagaaaaattgggactattatacaatctctaagtgatagtaggctctcaaatgtgactttaagaacatatgttaacctctctcgaccttaattcttcatctctaaaaggaacagtttagactaataatcccagtgatccttctgcgtggtctcaggattctgtgctcactgcaaaataaatagcatttcagtctgtagatacggtatatgctggcttacaggtgagagagacactttaagtgtgattattttataaccgccaaattcggaatcggatttgagagctgggatttttgtgtttatttttaagaactctcatggcctacatatttctggcatatgtaaaatttgttactggtgatataccctgtttataaacagaaacttgttctttaaagacaaggtaccaatgtgcttaatttttaaatcaatagaaataaactaatcaagaatacccatcaactgcattgtggagtggttgttgtatgaggaggcagtagggtataaggattaaggacccagactctgggtttgaatactggaaatgccacttcttcctaactgtggaactttaggcacattaatgctgttctctgtggcttagttttctcatctgtaaaaacaacttctgcctcatagagttgttttgaggattaaatgtattcatgtatgtgtagtacctagaacagtatccggtacatataaacattcatgaaatgttacctgttgttagcattatggataagagatcacttatttgaattaaagaagctacagaattaatggataaaataaaaatattgaaggtaagctgcaagagggcagaggtttttgtctgttttccatatctgtttcctgggcaccagcctaagtatctggcttagattaagtgcccaacatatatttgttgagtgaatagttcaagattcaatgacgttgaaacctctattatcttgttttttttttttcaaatgttcctctgtattttaatgtttcttgtattcaagagcattaagccatatgctataaattctataacataatgagtagtaagtaacagctttggtctctagattcctgtttcagttcctctgtgctattttaagcagaaataccataaaatcttagataatttcttataaaaacaagtgttaggcctcatcttttttcttctttttttgacaagtaaataaaaccaggcctctgcttatttagacatttcatgggtcttggcagttctctttgttgtagcagtagctgtattgatccagctgttgcagttgctacttgggcagctgctgggcagcattgccaactgcctcagatggtttttaaactgattttagagagaaaaacaatccaggaattccagaaatacagctaagcctcccctctctcttgtccaattagcagctatggcttagaaccatggattccaaatacagcaatcctactcttttggatacaaactaatgcctatcttgaagagtctaagttggataaaaatctcaccctcagtctcagttttagtaataatactttagaattacagttactgtaagccaagtgtttataaggattttcataatctgtatcttattttacttaaaaacccacgctttcttctctttactctttcccagatagacatagttcctgagtcactgttgattagccaaagtgacaaggatagccactttagttaatgaaactaaattatttctcccaaaactaaattatttctcccaataggctctcggtcaaaatcatgctgatatataaggtgctttccagctttgtactatcttaaatattttattgttgtctaaatgattttgttccaaccataagcttggaaaacaagaaaattgtatagtacaacaccaaaacctaataattgtcaccacagggtgcattggccaatgggaggaaactttgccttttttattttttttaacagaaagaaatatcgatatccaacttaaagttcccaggaagggtatgaaaatttcgcataaagatcttataagttttatagaaggagagaagctgaaaacccatttagacctattctgcccaaaatgcagtggtacagaaacctgtcaaagtgggggaatgtactttccaaagaccagggatgagaagcaggcaagaagccctcaaaaatcagctgcatgaagatggtggttgcaatatcaccagcctcataagaatatgtatatgtttcaattccattgtggaggtggaatctaagcacaaacagtcccttggcgatcacctgaacagtctccagagaaaagagagaaaagaacgtacctgctataagcattatggaagcttttataatttagaaggattattaaaaagagatgctactttatgtgttatcccaaaataaatgaaataagtgataaaattcattaaggttgatacaaagttctgtctgtggtccttattggagacacaagcaccaaagtagtttctaaatagaagctctccactgtttttgatttgtggaatttgaggagtgaatgccagtcatggctaagtcagaaatttaacttagcatgcttactgtaccaatgtagaaagtatacatgttatcattatgtccatgcttactcaaaccacatcctcaatcagagcgtcctctctcttatacaaagctctatcacacaccaaccctgaactattcactagagagagttgtacccagtgttacatattatttagtgtctctcctccccacaaacatacaccacttctggatgaggaaggtcataagtcctggttctaaatactgaagtgtaacattgccaagtgtaacatttcccctatagtcttggactcctctaatcataggaacccaagggaaccactggaagcacaaagataatccttccccattttcaaaagcagccatgtcactaatcagaaactggttaatggaattagcattgcatttaacttcctctgccttcaaatttaatatacaagcactgttttgtattcacccttcccccaaccatgtaagaatttaagctagttttgatagaattttctctcaaaatgaaaaagcgattttatgtttatttaatgattgaacctgtgccagccattctggtgcgttcccaagtaggcatcagccatctcatccctatttgagtagcatcagcactttcatccctattcgagtatagagtattttgagcattacaatgtacgtcagcatctgtgacagatcagcatctttcaaaacagaaaacaatgtagacagcctgtaatatgcttttcataccacaggtgttgatttctgccccaggaaatataagaatggcacatcaacagatattacccatcatgagttgtgtctgagtgttgattttaaatagtctaattaaaatgtcccatggttggcaaaatatttgatgatcagcttgcacaatagttgttgctctatcacaaacagggtaaagttgaccctggtacctgatcattggctgccatcagtgaatctgcacaaaatggagatgcatctacaagtaagaattggggaattggctactcatcaataaattggtaggtatgaaatgggtatatatgctaggaaagaagcacagtgggaagttagatgcaaagtcatctgtggaaataattataaatccataatttttaaaaaaataccagtattcaggtatatcatgctgtataaaatgcagtgagattatttataagggctaatattaaaaagtatagaaaaatataatttggtttagattcttaatatctataacctacttcttttaaaaggtctagtatatattttaagcaaataaactaactcttagatttattaaaaagagtaataattcttaatttaatagtaaatattaaatatttaaaatatttaaatataggctctgtactgaccattgaagaattttcttaaatttaacatttccaatcagtttaaattatacaccaaattaactaatatcttcatgcataaaagtctcagttttaaggttgtaatggaacctgacttgaccagttcatccttatggtacatgctgataaatccactaaagtagggttttgattaaatatattctgagaatggttgtctttggttattataatagttagaaaacagttctcagccttcatcaacctgttaaaattagtggcctgtaggttattccaacatagttcttttgtatgtactagacaaatacagttgttagttgaaataatgccaatattataaatggatcaaatgactctgggttgattaaataattgtcttttttctaatctataatctgtgctcacttttattaaaatagattcatagcaactatctgctgtgtgcgggtaccatactagctaccttcatagacgttatgttttacagtctttaaaacgtgaataagaagttttgcatctgataaatgtgactgtgcccccttggggccactcattacttttactgcagcatcaaatccttttttttcatgaccctattatatcatataatgtcctggtctctttcttgcttaactaccttccatgaggtcagaaatgattacaacagcaatcatattaggtaattttagtgcctatgaaacaagctaaagagaaatctctgatttggtgaattgaaaaccatatagatatggggatgaagagttcctatgactgattttcctatctggattcaaaccttgcatttagtataatatttacaatacaaaagacaagccttcactgtcacccacagtcacaccagtgttgttctcagctggacagtatggattacttgagttatgcatgagataaaaattggcagccatccttgtgctctcagctcttggttatgcatgaatgcattattcttttgtgggtaacacattcatctccggattaccacctcataattgctgttatgggacctcaagccctcttcctccctgaatacttccccaaccactctagaagccactaaggacatgactcacaaggttcctgaacaattacccttagccaacatggaacatctgccattttcctcccctgcagcccaactctcttttgtcatattgcttagttagccaggtgcatgcccactagtaatgcaatcacaacccacttatgttgccacctgtaggctctcccaagatgagactatttaaacatctcatcactaaaactcctctgcaaaaatgttgagaatgtcttcttcccatcatgttagactctctcatgatagtccttgcagggtgggccttctgagtgtcagagaaaagtttgagaacaatttacttctctggttcctgtttacacttctagtctgggggactaaacttggaaatttacctcaaaattctaaccatcacgctcttgatagtcactggttaaaaaaacaaacaaataaacaaacaaaagcaaactcgtctttcccaattttcccttagagtttcttaatcaacatagttgctcttagattcaggttcagacatctccaaatgaacatgtgaaaatgcaactcttgatttttctaaacagttatacatactacagccatggtgatcatcttaaaacagtagcagaccaatggttctcaaaagttactagatattagaattatgtggagagtttttaaaaagtaactgatgcccatattcttaaccaagtgtattagtttgttttcacactgctataaagacatacttgagacagggtaatttataaataaaagaggtttaattaactcacagttcctcatggctggggaggcctcaggaaacttacaatcatggtggaaggggaagaggcatgtcttacatggtagcagatgagagagagtgagcaagattgaggaaaactgccttataaaaccatcagatcttatgagaactcactcactattttgagaacagcatgggggaaaatgcccccatgatccaatcacctcccatatggtacctccctcgacacatggggattatagggattacaattcgagatgagatttgagtggggacacagaaccaaaccatatcaccaaagtaatgaatcctttctaagggagaaaaactcatatgaaatgtgtgacccacctcatctccaaccacagagaatgaaaaatgtaaacttgacatgctaaactcaaacttttcaaagacaaagaagaggctgggaggagaaatgtactagggtggaaattctggctcccatcctccatttgttccctgagaagttagaactgaatgtaaaaaaaaaaaaaaaacatgaagtgtcctctgcttggacctaggagtatgtgctttggaagcactcttgatgcctcaagtatgagacactttaggaaaagtaacccaaaccagaagagaactgatagtggaataaagaacataggatgtagtgcagggcctggatgcacctgttctatgcattactgcagagttgtgcactaaagcatccaccaaaaacatccctgattttagtttctgttccttaggtttgtttcttaacattgtaaaaagcattcaactggacagtgttgggctgagcggtgaatgtttctccaagattgtagatcaaggcttgatacaagtgaattgtgaaacaccccacactggcccatattgttaggggcatggctgacatctggctactaacagtttccttctgttcttttgtcaacgtcagcctgattattttaataacaattcttgtgtgtcactatccttgtttgtatatttttttagaggaatatggtaactaagtttccgttgaggaaaaatacaaatttaaaaaatctaaaacatcttgtgtgttttatttgttcacttgttagttatattttaattaattttaaaatgatgtatataaatgaacaagatatgtctcaaaaatcacaagtggaacttattaatatcagttctaaatagtgcctggcaacaaaacattggtttccagagccttacaaagaattgctgtataatgggccttctaaactaatgttagatagaagttgcacttaataaagttactgagatattaaattattatagttgaaagttagccaggaagttatataatattttgccttcatggaattgtgtgtttaacaataaacaagtcaatcccttcatcaagaaattgtatgaaaatatgtaatggtacgtgtaagatagacttcttattacactcttctgtctttagaatgtgtgactccaacatatttcatcacaggttatttactgttcttaaggcagacagtagtataaccattactatcattaccataagctttaatttagagctcatgtgcatagtgtaagtgtgaaaaaattcacaaactaagtttatactctgaacttcatatttaaggcagcttttctattaaatgtacatctaatattccctttccatgttctgagttcaaagctccattgcttcaaatattaaaaatcccccagaagtctttaatcagcacagctctcctatagaagagatccaaatgaaatttgaagaatagaaaaagcataattggagctattttttcaattccttcttcctcccccctcactatgcttgtctctctcattcttgtatacacacccactcgtacatatttttggaggcagaagagcactgcttgctttttgtgcaaatgaaatagcaaaagaaaacatgttgctgtgaagctgaaatacactcatcagactaccaagtgcttctagagaaagctttcactgaacgtcattctgagggacgcagctcccttcctcttgaggccctaggcatgaaccatccgacttcccaatccaacaaaacctatcagacaatgaacagcagttgaatgcaaaattaaaggcctgaatattgtagtcactaagtgattggtagcttgtgactgagggaaatggggaaaaaataagccattctcttgtttcttctcgcctctctttgtggttttcttgtcattctaaaaatgctgaaaatgctgtgggacttagggacctcctggacacagaagatagtctaaaaatacatttgtttaaaaatttaaaaaaaattccactttagaatttgtcttcttttgaggtaatctgttacacaaggctgctataatttggctttcagcagtaacaactagttatgccaaaaatgaatcgtaaataaagtctagacaaatgcagtgtttttattccagaggcagccagcagatgctttgtgtaacctgcactctcctgctggccagattaattttgcactatgcttttactgtgtaatgccttggaacaaaacaaatttaaaatgtgtcctttggccacttggacttcctcagatcactcactgtagcattcttcaatattaacgaagagtaaacagtttaagggccttctgatagtcaatgacatatcacacagccctacttaggccaaggagttcacaagcaaagtaataagtactccagagatgttcttcagttgtcaaaattctgtagcatgtcaagtgtggaaagaaggacaaggaagaggaatgcaaacctaggggaacagaaatctcaactttctccatggactgtcgatcaagtatatcattataatatctgaaaaccttgcctttcccttctgtgatagtcatattattgtggaaaatatgaaacctttcagatccaacactttctcttcaaaatgcatgttatatttgaacaaacaacactgctgcttttctaaatggattagtaacaggatcttaaaaaccaggctttttctttttgagtgaaccagtgtatcactgctgaggaaaagagcagaaaggttagtggagcttgtccttgaaatatagcccaaattgatactctgtgcaacctaaatgtaagcattagctgcagtgattgtgggacacatgattgagctttccactcattacaagcaattctcctaagctcaatagacagactttccttaattgaggaacaggcattaccaatgaatttttatgagtttattcattctagaattgttcatcataatgcagtcagtttattatattaaaaatatatatcacaactgaagcagttttgtaaaacagacgttaatacactactgtatctatttatttgtaccttggggatataagggggaaaaaaagcaaactgcatgctgcatgaaaaatcatagccatccaatagctaatggctatcatgttgaaagtcaagtaaatgcttccactgagccccagtcaaatgtttggggttgattatagtaagatgaaagggttagttgaaattgcaagtagatgtagcacaattgggtattaattttttttaacgtttgttgaaaatggaaaccatcattctcagcaaactgtcacaaggacaaaaaaccaaacactgcatgttctcactcataggtgggaattgaacaatgagaacacttggacacagtaaggggaacatcacacaccggggcctgttgtggggtggggggagtggggagggatagcattaggagatatacctaacgtaaatgacgagttaatgggtgcagcacaccaacatggcacatgtatacatatgtaacaaacctgcacattatgcacatgtaccctaaaacttaaagtataataaaaaaaagagaaaataaaacataaaggaagataactgaagtgtattgtttatcattataagtggactactgtctgctacttctagctcactgtgtctatctgaatttatatatacccactgtgatttaatcttcagtttaactagtagatgccagtccatattttcactatatctacaagagttcctgtttcttcttatgactactcatatcaataattctggaaaggggagtcttaaaagccacttaaaaagaagagtgacccaagaaagcagaaggctaaagtaaagtgcagttgtcatctatttatagactgagtattttaattatgccttttaatgtattactatggttaaaaataaaagctgtgtatgaagtcttgaaaactaaaactgaaatgtttatgttttattatagttacaatttttcctttgaactttccaaataaaaaattcccctgcagactcatagacaaccagtattgcttagcttacgctgtaagcctgtaaatggggaaaattgttcaagagtgtaatcactaagccatgaatatggctctgggtgctcttatgcaagtttctctggccagtatttttatgtatggtttgttggaatatattttttcttttcttagatttaaaagagttgttagaaaatgtgcaattggagaataacttacacacacacacatacacacacactataggctgtttctatgggcctctataaagcttacaaattcagaaaataggatattcacattctctcaatgaatcagaaatgtagcagttcacatgactaagctgatgactaagcagacacttggggagaagagcttgcaaattgggctttagggaaaatgctgtcattagactctaaaaatctaaaataattatcacttaaagccaatgtgaaaaattaattacaatatttttaggtcattaatttttctagtctcagatctcttcctcccctccacacccatttcctggcatattttaatctagcccaatatttaaaataaatcaaatgtcagaggaactctttaaaaatcaaacctggagtttctgtcagttctttttccacaatgtttttattggccagtagcctatgttctgagaataatccattttctcctaactagaaagacttttaaaaaattttttgcagttgtcatagagatggaacctagcatggtggcaggatgtcagttattttgtcttttgtgatatttatatttttgtgaatatttttatggtgttttttttcctgcctgcatgaggtgattctcctgcctgtcttgtgatagtaaacacaggagtaaacgtgctctatttcctcacctgctaacatttgagtgtgatatgcttagttaatcagttcactgaagcaattaagttgcttttcagttttttttctttttgtgtcttcaaaagggcttcatcttctggaagtgccacattgacatggtaagaacaagtttatatggtgcttgcaagatgttgctcactattctaagttctataagtagaataaaacattgaatcattgtggcaaccctaaaatataccgatgaaaactgaggcacagagaagttaaataactttcccaagactgcgtgcctagtaagttgacagtacagtatttaaagtgagtaatctgtgcctagaatctgtgaccttagccatgactctgttcttctcacacagaaatttactcatgttttttcaattatgcagaagagccatccccaaaagattatttaagatgaatgctttgtcattttttttatcatgtagtggacatactttcaaaacgttacattgtattaattaaaatctctgattcctagtataatatagacttttaattccttgctactgccaaggaattgcttacttgaaataaaattttacttaaaaatgggtactctgtgttaccatatacttctatattgctgtctcttttcagctcagcattttactgtaaaaagaaatgcacacatatttaaaagttcttatatacaatgaagattcgtgacattcgttactgaatttatagaatacataatcagaattttataaacacaagtatgtattttctaatgataatgttgcaaaattagttacttttcaaaggaatcaagatcaaatttcttgtacttaataaagttaataagtaattaataatgtaagatattgttatataatttagtgttccttgtgtactaggactagcgctatataatatgcatatttacatccttagaaaattttgtttttctgttaaaaatgtatgttcagttttccccaaaatgggaaaatatctcagaataaaatacctatttgtttcaagtatatcaacaaataatgtttactcaaaaatctcccagatttgtatttttttgaaaatgttagaaaactcccaaatcttacattaaattagttatgatttggcctttaatcactttaatcattttatcagaagagttgaagtctactaagtcaagttagatatgatcccactagtgactgtaactttgtatgttaaaccacctgttctcagcatgtacaggaacattatcttctgtttgaaaaaggtaacataaaaaacttaataaaagccaaacaaccctgcacttgttgttattacatttaaataagttatttaaccttttgtcatttgcttttgctcattcaggaacaagatttaaagtactatcagatgaatgttaaaacgtacttgcacacacattaatttagccaattctatggttgtctacaaaataaaggacagaataaagctagacaattcagtaaaaatattgctggataagggctaggtaagctaaaattgctaaagatggctcctatctctgctctaacattattggacaaatagagcgtgatacttagagatgggtatgggatgagtatgagtctggatgagactagaagatgaaaagcagtagaatcaaaatttttaaagcatcagataaatctatttacctgttctccaatatcatgcccttggcaatgaggaaaaattaatctttcatactaatcattaaaataaagaaaaaggaggtaaaaacttcccaggtgatatttgagaaatgaaatcagaaaatggggagagtgatggtgatggcgacgatgtgggaaggactgtgggctcttaggaataagttatccttgttgtctttcaagtacttgaacgcagatttcaaaaaatagaaattatgtttttcttaccacataaatgaagacttatgattttgtaagtgttttgatatccaccacagttttaaaataacccagtaatacttgcagtgttatttttgtagtgtaaccacttgtgtgaatgaacacatagctaataaatggttaaatggaataaagactggcctaagagcatgacattatgaagtaaaaagtcaggcaaaaataaaccgctgtatgtgcaaaagattttacattctaaattaaaagtaactattaaaaatatcactgagaagagagtataggtcttatatccttcaaataaaccacttggtaaatgcagggaatgctacaggaaggtgcctctgctactcagaagttaacgaaaatgtgtggttgtcatggggatactcaaattacagaaagaaagaaatcaggaaatgatgaatgtaattaatttttcttgaagttcaactgatgcaaggtaaaagcatatttattatgtgactgtctagccatccatgatattaaaaaaatgaataaataccaaatttgcaatatatgtaaattaggcaaattttgtcatggaagttcacaacaaatacaattatagttactcactgaggaatttaattttttcatatgggtttgcataaataaataaataatttataaatatagaaggctgacttttgttagtttttgcactttttattaggagaaaaattaatcaaagaggatgcaatagcccgcatacaccagaagcaattggtgtgtcaaatttgctgtagtgctgagcagtagaccactctttcagggtagaatttgagcagctttcaaatgcccagttctgctgctaacattaaattagataaacagatcaagattagattagataaatagatcaggcaaataagtgaacaatatagttgttaaaaaaaaattcaggagtagtaggggctggtgagttttacgtagactaaagagctcatgctttgtctaaatgagcagcagcaagttaatttctctaatagttgtcctgcatgaatttgaatccatacatgctagatctgatttttcatgggaagctgaacatgtttccatgaaatatttttctgcaaaacctcctaatttttaaatgtgggcaagtaatatgtttaatcagctagtggaacacaaaagaactactgtcagcaactagtttgggatcttttatagggctttatgtagagttgtccttcataagcaggctaaaaactgatcaattagggatttgttggttggaatctggttggaatcttattacatttccttattcacaggtgtatgaatatgaagcagtccactgtgttagatcagtggtagcttttaataaatgatagcttcttcaatctgtaggtatagtctgcgtttcatagatcccaggtaccaacctaataaaaccttcctatcagtacctgcattccaggccatggatatttttagttaacacttctttatggttcacaagagaattttacataattccagccttccataattcataattccagtccataattccataattccagtcattatgggattccgtaattccataatgtccagtaaaagaattggctaattgctactcccatcgtttgccaatcttcagataaaattttagcatctataacaacgagaaatttgtgtaacttttttataaagattaatgtatatgtactccttcatgggtttagaataagaaaaaaaaatggtgtcatcttcaatgttgaaaaatatgccagatcttcaaaccaaaaggcactacatttggcccactgagaactaatttattcaccaaagtcacctcaatatgccagattgagttctttgcttctaggagaatccaagatttaaatctacatgtaacaaacatatgatacctaacgttcacagagtgccaagaatttacaaactacattttaaaataagatctcattttgatcctagatataatgaaaacacacatcaaactctttcattccctctttgacttcccaaagagggtctttaaaaaatattctaatggattattttcttattttttctgtaaagtctttatcacactgaaaattacagtgtgatacagtggcatatattatcataatgtgataatatatacttgattctatatcattttttagttaaattttcccatataagcctaggaggattgaaggagatgttatttgtaaagagcctcaacctagtgccctggaatatagacagtttgtaataaatacaaatatccttagttgtttcgattttggtcaccttctttctaatacacctgttttgtccaacttatccacttctgccaattcctaaaacataaattcaatcatggtaatttcacactccaacatgtgctgtggatccttcctgcctctaaagatggggcatagctttcaaagccctctctttcatgcttcctctttaccattgtgttttatccaaactaaacaactttctgttcagggtttctcttagcttagtagctttgttaacaatgttcccatctacctggaattattttactaaataataataaaagtcaaatgcatgtttgagacctagctctatgaaatacttctacacttcttttttttttttttttttttcttttttgagacggagtctcactctgtcgcccagcctggagtgcagtggcaaaatctcagctcactgcaacctccgacttttgggctcaaacgattccactgcttcagcctctggagtaactgggattacaggcatgcaccaccatgcccggctaatttttgtatttttagtagagacaggattacaccatgttggccaggctggtctcgaactcctgacctcaactgatccacctgcctcagcctcccagagtgctaggattatagccgtgagccaccgcgcctggccaatatgcttataatattcctacagttctaacagccttcaccttctctggttccaggaccctctcggttcttagaggacatacctataagttttgagccttaaaattaatggagtacataccttagctccattataagatcataagcatatttaggataaagactccatcccactcacttttgtatacccagaaaggggtaaaatgcttttcacatagtaaatgctccataaatagttattgaattaacttggcagaaactataggagccattgaccagcttcctgccctattcagaaatcaactctacatcattccccctgtcctgcctgtggctaaaatacgtgcaagctcatgacttcatgacatggtgtttttccttgttgaaaaattgaaattattagaaaattttcttgttttgagctgaaatattctttccacttcactcttacctctgcctgtggaattggagtactatttttttttcttctacatgccaatccttgaaatgttgatacggtgctcaccctcagcattctcttatcatggtgaacctcaccgacctttcacccccacgttgtgttttttttatatggctccattctggtcatcctctttttaaatgctgctcattcttatcagtctatttctttcaatgtggaacccagaactgagcagaatactgtgtgaatgatctgaccagtacagaatgtggtagaaatatcatctccctcggtgcggacaccacattcctataattcagcctacaactttagcagccagattatgtggttagctcatagtgagcttcaacaaataatgatttaatgagtgcctgtatctgccaggcaccataaggaccctccacatgttatctcagtaaagtttataaagctcgattaaaactcccatgttcttgtcaaacaaattgctgtcaagaaaacatcttctgtcctcaatgtgtataattgtcatctcaacacaaatctaagatttttcatttatctcagttaaattttattattttggtattgtctcatcccttatcccagttaaatttcattatgctggctttgcctcatccctttaacctgtcaagatcatttaaaattctgtgtctggtgtcaaagatagcagtcagttttttccagctttgagtcaactaccttgttgataaggaagccatttagttttcagctaagacgttgctgaaaaaagaaaaaaagtgttgaactgaatggagcagagccaaggatgaaagctacctctctagactccttcctacagatttacaattagaatccctaaagtagggctcttctatagctacaaattcattaaagattctagcattcaacccacattctccatcatagttaaagggagcagcatgagcatttttaaagtgtgatttatataatgatagacctcatgaaataatgagattcgtttggcatgcagcatgctcaccacttactagaagttccaaactactagtttggcaaaactttttatgaaattgtccagggttgaataacagtctcataaatctttggattctatactttgacttttatccatttttgaaaattggtcatttgttcatctctgatcttgtgggatttactctgttcaccatcatttcccagtgattacccagaatgatttgtttcacctttcaaatgtaattcatcagtgtttggactgctacattcatttaaacagacaaaatgctctcataatctttgctcttattttgtgcttcaattacctcttgatggtgctgtccttcctaatgtgaaaataattttcccagtggagagaaataaaagcaaaccaccattttaccacatttaacaatatatcattgttcccaagcgatgattatattcatcacttttaaagtctcatttactccaaaaacagtatttatatcacatatacacatattttatgcgaagacttctttaatgtcccttagtaaaggtaagaagtgacaatttcagccacttggtccttttcttaaagattattgtttctcttttgtattcaaccttggttatatgttcttcccttcatatgttgtacacgttttgtttaaatcagagctcatcagaaagagagccctaagcaactatgatggtttccttggatacagattctttatttttctcatcgatatcatttgtgattgtattaccagattttcaatttttactttccatctcctttatattttctgcccattgaaccccccagggagaaaataatagctgttgattcttaaattgtttttcaatggaattacctaaaacctaaggtgtactttagtagccttttcttgacctctaaaatgtcatggatgctttctctataagtttccattatttcagattcaggaataagctcctctttgctgctaaagattaaatcaagaatagaaacttcagaatgagaaactcccttccttgttctgtcttcaatctgaggaatgctgtttcatcaagatagcacaataatttcaaatgctttctattaggagaaggagttgtcgagttacatgcccaggtggttgagatttccccgaaattgctactttcaccactttatgatttgtgtaatgcaacatcagcatcatatgtgtacttattagaaaagtgaattcagggcctcagaccggacctatggggtgagaagctttggaggtggatctcaacaatctgtgtgttagcaagtccttgagataattctccttctcactaaagtttgagaagcactattgtaaagcatcatccctacattctgagtgggaagcaatgcaatgtattatcccttagccacttacgttggctcagatatctgtaccgatgtcacaattttctaagcagatgcacatataccatacatgcagtattcttgccttttctatggacatgcttcttttgaacagagtcttctatattacacagttgcatcctaacacattgtagtaactgtaagatattgaacttctaatgttaagttgccagtgtttcaaaaatatattactcaggaggctgggcgcagtggctcatgcctgtaatcccagcactttgggaggccaaggcaggcagatcacctggggtcaggagtttgagaccagcctggccaatatgctgaaaccccatttctactaaaaatacaaaaattagctgggtgtggtggcgcatgcctataatcccaggaggggattacaggagtgcctcaggagtctgaggcaggagaataacttgaactgtgggggtggaggttgcagtgagcctagatcgcaccactgcactccagcatgggtcacagagtgagactccctctcaaaatatatatatatatttgtatatattacatatatatataaatagattacatatattatatatataagtagatatatagatagatgtattttactcaggctcagtgtataggtatgcagatatctgaggcctttcctatagtctgactcattcaagattgttttgcctgagaacttcttggcaccctctccactattggtcttgccagatgataccaaccacctatgcctgctctccttgctcccaaactcctctcactctgatccattcttctgtaagtcgacctaaaatacagccctaatgatggcatttccttgctggaaactctgctgatttttaactcctcacactggcatatgaggctctctgtaatgttacttcaaccatcctctccgcactttcatttcatgactgcctactttgtagcacactctccaattcaatgggatgggaatgtgtgttgtgccctggacttttctgccccaggccttttttcattctcttccatcctttcagcaggccatttaccttcacttcccctgttaaaatctttcacttcacatctcttgggtaccccaccctcacgaatcctttttaatgtaacttagttaagtgtcattcatcttgcctcctctccctctggtaagcaccaaaggagcacagaaagttatgcttgatgtgcctgattacacaccacttcttacaatatgcgattagggacttatccctctgttaaaaagggacatggatatatcctttatccttaacggtatctgttgaatggaagtaaatatgatgctgtaaaaattcatttaatcatttcttctctttccttttccccctcctaaaattttgtcaaatgatgtagttaatttcaaagtgcctaagtagattataactgccaaattatttgaacttagtgatttaacacaaccatgtgttatcttttagatgaaaggcccctggagtataacgttcttttgataaatctaaagttagttgtttatctttagttagttgttcatgacttatttccaaatggaaacaggtgtcaaatattaatttatgaaacttaatgtttaaaaaaggcataaatgtgtgtggagagagagggaaaggagagagagagcggggagatggaggagaaagagaggaagaagggaaggaatgagaaaaaaagagaagaaataatccgcaaagaatgataaatctacctatgttttggtcataaaggtcttcaatatttctttcctcctcttggtaatactactatacactcaatttaaatggaaacatcacctaatataggaaaagaattattttattctacactaaaatacaggtaagtgctaatttaagaattataaaaaaatgataccatgtatttggacagtatgtcctagagttgagattttatgaatcataaaaaggcaagagataaggaagctgaatctgaaaataggggaaaatacttagcaattaaccttaggatgaaatctctttcttgtcttatcattatcaattcatatttaagtcttaaatggaaaatgacttgtatttaaccttttaagattcagggaaccatttaattgtaattatagctaatccaattaaagatggattataataactgctgaattaataggtcatgaaatactgagtttaattagtagattactatttattttgaaaaaaaggaaaaatactctttcatgcgcgtctgtgtgaagagaccaccaaacaggctttgtgtgagcaacatggctgtttatttcacctgggtgcaggtgggctgagtccgaaaagagagtcagcgaagggagataggggtggggccgttttataggatttgggaaggtaatggaaaattacagtcaaagggggttgttctctggtgggcaggggcgggggtcacaaggtgctcagtgggggagcttctgagccaggagaaggaaattcacagggttaatcactcagttaaggtggggcaggaacaaatcacagtggtggagtgtcatcagttaaggcggggcagggcctcttcacttcttttgtgattcttcagttacttcaggccatctgggtgtatatgtgcaagtcacaggggatgcgatggcttggcttgggctcagaggcctgacattcctgccttcttatattaataagaaaaataaaatagtgttgaagtgttggggcggcgaaaatttttggggggtggtatggagagagaatggacgatgtttctcagggctgcttcaagcgggattaggggcagcatgggaacctcgactgggagacattaagctgaaggaagattttgtggaaaggggtggtattgttgggttgttagaagaaacatttgtcatttagaattattggtgatggcctggatacggttttgtatgaattgaaaaactaaatggaataagagaaggagaaaaacaggtataaaaggtctaagaattgggaggacctaggacatctgattagagagtgcctaaggagattcagcatagtcctgccagcaaagattatttatttacttcaagagttaagagtggccgtttggggatagcacgaggagatatcagctgtgatggcttggagaaacagtgtgaactggcagtgtaaacaagagcagggcatatatgaatagttgagaacggagaataggagtatgactagacagaaaatagtagggatgacaagtttttttgggggcacagtctaagttggtccggtgtctggaatgagactggggcctaataaaaaggagcatctatacaggagcttaaatgggctgtagcttgtagcattctgaggacaggtctgacttctgagaagggaaagtggtaaaagtattgtccagtcatttttaagttggtggctgagcttggtgaggtgtgtttttaatagaccattagtctgtcactgaatactaagagcctgaaaaaatgcttggctgatttgactaataaaggctggtctgttatcagactgtatagaggtgggaaggctaaactgaggaattatgtctgacagaagggaagaaatggctgcggtggccttctcagaccctgtaggaaaggcctctacttatctagtgaaagtgtctacttagactaagaggcattttagtttttgtgactcagggcatgttgagtaaagctaatttgccagtcctgggcaggggcaaagcttcgagcttgaagtgtagggaagggagggggcctgaataatccttgaggagtagtagaatagcagatagaatagcagatggaacactgagaagttatttccttgaggatagatttccacgatggaaaggaaatgagaggttctaagaggcgggctagtggcttgtattatagcatggcctgcctttgctggtgtgtggcgattaggcctggtggaactgccatcaataaatcaagcgtgatcagggtgagaaacagggaagaaggaaatgtggggaaatgggatgaacatcaggtggatcagagagatgcagtcatggggatcaggtgtggtatctggaataatgtgggaggctgtattgaagtccgggccaggaacaatggtaattgtgggacttaacgaagagtgagtacagctgaaggagccagggagcagaaagtatatgcgtcaggtgtgaggaagaaaatagattttggaagttatgagaaatgtagagagtgagttgagcatagtttgtgattttgagggcctctaaaagtattaaagcagtggcagccgctgcacgcagacatgatggctaggctaaaacagtaaggtcaagttgtttggacagaaaggctacagggtggggtactggctcttgtgtaagaattctgactgcactaaccatgcctaggaaggaaaggagttgttgttttgtaagggattgaggtttgggagattaatcggacacgatcagcagggagagcacgtgtgtttttacgagaattatgccgagataggtaacagatgaggatgaaatttgggcttgactgaagtaatggggtctgtctgtgaagccttgcggcagtacagcccaggtaatctgctgagcctgatgggtgtcagggtcagtccaagtgaaagcgaagagaggctgggatgacccgtgcaaaggagtagtaaagaaagcacgtttgagatccagaacagaataacggattgtggagggaggtattgagaataggagagtatatgggtttggcaccatggggtggataggcaaaacaatttagttgataaggcatagatcctgaactaacttgtaaggcttgtctggttttaggacagctaaaatgggggaattgtaaggagagtttataggctttaaaaggccatgctgtagcagacgagtgataacaggttttaatcctttcagagcatgctgtgggatgggatattggcattgagtggggtaagggtgattaggttttaatgagatggtaaggggtgcgtgatcggtcaccaaggaaggagtagaggtatcttatacttgtgggttaaggtggggggatacaagaggaggacgcaaatgaagccttggattctgaagaagggcggcaatgagatgcagctgtagcccaggaatagtcagggaagcagataatttagttaaagtgtctccgcctaataagggaactgggcaggtggggataactaaaaaggagtgcttaaaagagtattgtctaagttggtaccagagttggggagttttaagaggtttagaagcctggccgtcaatacctacaacagttacggaggcaagggcaacaggcccttgaaaagaaggtaatgtggagtgggtagcctccgtattgattaaggggacggacttactttccactgtgagagttactcgaagcttggcgtttgtgatggtctacggggctttcgaggtgatcaggcagcgtcagtcttcagccactaagccgagaaggagtcggtcaaagagccttgggccagaattccaggggctctgggagtggctgccaggtgagttgaacactccgattttcagcgaggtcctgcacagatgggacatggcttggaggaatcctgggctgcaggcattccttgccctggtggtcagatttctggcacttgtagcaagctcctgggggaagcgggcctggaggaacgcctggccgctgcagttcaggcgtttggaagttcttgtgtgctggagatgtggctggggtttgtctcacagtggaggcaaggaattgcaacttttttttttcattattgtacaccttgaaggtgaggttaattaagtcctgttgtggggtttgagggccagaatctattttttggagttttatttaatgtcaggagcagattgggtaataaaatgtatattgagaatgagatggccttttgaccttttagggtctagggctgtaaagcgtctcagggttgctgccgaacgagccatgaactgggctgggtttttatatttgatgaaaaagagcctaaatgctatctgatttgggataaagaaaaaggagcattaacctggactatgcctttggctccagccacctttttaagagtaaattgctgggcaggtgggggagggctagtcacagaacgaaactgtaagccagaccaggtgtgaggaggggaggtgataaaaagattacagggtggaggagcggaggctgaggaagaattggggcctagcttggcctggcgaggaggggagaggtcagatgggtctgtagaaaaggaagattagaaagactcagtgacgcttggggttgggactgaggggacaggcgggagggaaagaaggaagatttgggacgagttgcactgggcacagagactaggaagggactgatgtgtaaaagaatgcctggacgtcaggcacctcagaccatttgcccattttatgacaagaattatttagatcttgtaggatggaaaaattgaaagtgccgttttccggctatttggaactactgtcgagtttgtattggggtcaagcggcattgcacaagaaaataagacgctttgattttaggtcaggtgagagttgaagaggttttaagttcttaagaatacaggctaagggagaaggaggaggaatggaaggtggaagcttgcccatagtgaaggaggcaagcccagggaaaagagtagagacacggagaagggatgggggtttcttgccctccagaaaagcagagaaagtgttggggcacnnnnnnnnnnnnnnnnnnnnnnnnnnnnnnnnnnnnnnnnnnnnnnnnnnnnnnnnnnnnnnnnnnnnnnnnnnnnnnnnnnnnnnnnnnnnnnnnnnnnnnnnnnnnnnnnnnnnnnnnnnnnnnnnnnnnnnnnnnnnnnnnnnnnnnnnnnnnnnnnnnnnnnnnnnnnnnnnnnnnnnnnnnnnnnnnnnnnnnnnnnnnnnnnnnnnnnnnnnnnnnnnnnnnnnnnnnnnnnnnnnnnnnnnnnnnnnnnnnnnnnnnnnnnnnnnnnnnnnnnnnnnnnnnnnnnnnnnnnnnnnnnnnnnnnnnnnnnnnnnnnnnnnnnnnnnnnnnnnnnnnnnnnnnnnnnnnnnnnnnnnnnnnnnnnnnnnnnnnnnnnnnnnnnnnnnnnnnnnnnnnnnnnnnnnnnnnnnnnnnnnnnnnnnnnnnnnnnnnnnnnnnnnnnnnnnnnnnnnnnnnnnnnnnnnnnnnnnnnnnnnnnnnnnnnnnnnnnnnnnnnnnnnnnnnnnnnnnnnnnnnnnnnnnnnnnnnnnnnnnnnnnnnnnnnnnnnnnnnnnnnnnnnnnnnnnnnnnnnnnnnnnnnnnnnnnnnnnnnnnnnnnnnnnnnnnnnnnnnnnnnnnnnnnnnnnnnnnnnnnnnnnnnnnnnnnnnnnnnnnnnnnnnnnnnnnnnnnnnnnnnnnnnnnnnnnnnnnnnnnnnnnnnnnnnnnnnnnnnnnnnnnnnnnnnnnnnnnggacttgctgctaagggtgaaggaccaaggcaggcgtccctgcgtggtctgacacccttgaaacgtgggtgaataatcaggcgtccctgcaatgattaaacaccaagggaaggctgccttcccagtccgtgaccagcgccggagttttggggcaagtaccccaaccccttctctccttgtctctaccccttctctgctttcccaggtttcagcaccaaatttcatgcgtgtccgtgtgaagagaccaccaaacaggctttgtgtgagcaacatggctgtttatttcacctgggtgcaggcgggctgagtctgaaaagagagtcagcgaagggagataggggtggggccgtttcataggatttgggaaggtaatggaaaattacagtcaaagagggttgttctctggtgggcaggggcgggggtcacaaggtgctcagtgggggagcttctgagccaggagaaggaaattcacagggttaatcgctcagttaaggtggggcaggaacaaatcacaatggtggagtgtcatcagtcaaggcggggcagggccttttcacttcttttgtgattcttcagttacttcaggccatctgggtgtatatgtgcaagtcacaggggatgcgatggcttgacttgggctcagaggcctgacatactctttctaaggtattatgtgaaaactctaaaattttcatctaaaaattatggagattgcattattagaagaaagaggagacagaggagaaggaggaggaaggggagaagaaggaaaaaggaacagcatagcatgaaatttaggaaaaaaatctgagttcttacttttatttttttctttagtttaaattattttatatttgcaatcctggaagaagaaataatagtaactgtttaattccttatttcactagacaaattaagattgttaatacgtacgctcacagaacaaaaagtaataattaaatgacagttttagtctttaaaaactacaaatcacagtgcaatacaatctaaatcacttatagacattttgcatctatttgttttatatttagggaaaataatacagttgcagttaaattaagctaagtgacctatgctagggtcaggcgaattatttcaatattcgtctttgttaatttgtttttagaaaaactgcggtaagaaatacaaatgtaaatgactaaaaacaaagacttggcatgacaaataattccacaagtaaaattaaaggactgttttatgatgtatgtactgtagattatgcagtgttgtgggcctcaatcttgcttgctagtcacacaaacatatacaaaggaccttgctcccacagatgtacacatttagtccaaatcctcaaactgggaagtcctggagcaacatcagcaactccctcaccataaatatggcatttccttaattctatgctgcactattttcatatttaatatttctgaaatctggattcatcttagaattgaaatgtaagaatgcatgtggggtcctcaaactcttgttccactgcatggggaatttttcaggttgacataaactaaagtagtattaaaacccatccctctaagagtgtcttttttccttggatggcccaaaaactatgtacatcatggtcagaaaggtatttttctgaggatattgctctttttttttttttctattaaacatgctggtaaaatgtgtcagagtatactgctttctactcttataaaataacccgtgggttatattttcaagatgacaaaagctatttaaatgagatagttagtggacatttttaaaaaactgaaaatcaatccagaatatgtgcttgaggaactctcagggaaccaattcgaagatttgcacgaggatcccaggattcctagtcattttttcagccttgggccatgtaggtacacagaaacataaactggcaccagagctagaatacctaatttaggggccccaggccagggggtgttaagattgctgggtgctcaacactctcctatggggcacccaggcatgtcccagaggaaatgtgtggctactgaaaagtgcactgtggttgtatacatcagatgcacaagtaacacaaaaggcaccacatgtgccacacactggagagttttgctacctccccgggggaagccaaaatgcgccgctgcagcacttggaatgaaaatgcattttctgtgagcaacagcctcctttgaagaaactgctttctctttcaacatttggaagctgcttggcaacccacaatcaaggttttcgttatgttgttttaaacaggcccattatcagtgtctcatctctctgaaagcttcagacttcatcatactgtttttaaagattaacatattatacctgataagcttctaaaacttgcagccttactaaagctgactgttccagcactttcttcctattaaaagtgagttgcacaagaattaaaatagatactgtttgtctactcttttcttgcgataagaaggcaacacttcacttgttctgatgttcattttctatccgtacattcaggaattcatttttaagatgtcctttcttttgtcaaaatgttagatctgtgcaagaatttataaaggaaaatcatttcagacatgtttgtaataggcaatattaaaagtaaatttgaaggctacagtgacttattgcaatattttgtttgtcaatagtctaattagaaactaagaatattcttatattcgactaatgctgatttgttacctcacctgtcaattcttacatagtataaaagtagatttggaaaaactgaaaataaatatatgtatagacattgagcaaaaatagcatttttagcttcttgaaaattgtaggctttatctgtaatggcaaattttaaaaaattgtgacagatgcaatttatttggacctaagtttaatgagtgaaaggctgaacttatgtaaaatactaaaaactacagtgccctaaaatctaaagttgcaatggcaaatcaagattggaaatattaattatcactaccttgcacagtagaattgtgtgacttagggctaagaaaagctacaaaagagcccagaactacatatctcaaaactttaaattaatgggtttccaaagaggagttatgtagcacataaaaattaaaattaagattagaagaatgtaatagtgtaagttgagtagatagaacatttctttcgtagttttaaggatttctgctaagctttgactcattgatagcaagaataacacacaaagtaatattattacttaaaattgtcacgacttattgaactaacttatttaagatttaagctacaaagattgggcctttcagttaacataaaacaaacaaagttacataattgtactgttgctcaatttttgactttagacatagtcagctcatgttcttgtcatgtgttgaagcacaatttttcaacgttagccccaaatcatagttccatgccagcaagtgaggtttccccaaaataaagaggatttctcatccagtttgaacaaaaaatagctacattgttgatttgttgaatgtttttcaaatgcaataatttttacattttggatttagagaagagagaagtaggagagaaggcaggaagggtaacacttaaagacagaagggaaaatattctaacaccattgagtgttcactcagaaaacagcaatgaattacgtggcctgtgatatttaatgagccctgtataatttgctctattattagtcaatatttggctttctgtgagcatttacaaaattataccttgatgaacaataggtcaagtcagtttttccttcttgctgacagagaatcattgaatcttttaaaaattgtcagaggtgatccagatgtcattagtgcactagattctttcatgacttggggaggagccacagactctcatctgtcagaaagcctggtggagggatgagttgcttggcactaataatctcattcatgtacttagtgttacagctgtctaaataagagtgctttactgttcttatattggcacataattaaatatcagttctaagttacatagcaaaacaacaaaattctaaaacccaaagcaaaaattaacttctatattgaaatacttgaattgcctgaagtgggaggaagggcattattttacagcagccaaaacaagcttttgtttgtttgtttgtttgttttgttttgtttttgtagttagaaggcaactccacgtagtgaagaaggacaggttttggagtttaaccaacctaggttttaccaccttgaggaatttaccctgtctctctgagcctcagtttcctaacatgactgtcagagggaacaagatcatgaatgtaaaacatcaaatatcctaagtgttagtcatttctccttctttctagttgcaagtatgccttacttccttcataccaaatgtaattaccatagcagtgtctagaatgtgtcaagttgtgacatgaaacctaaaaaatacagtcagtatctttagtttgggactgacagttttaattgtcatgttttattgttcccttacacatcttgatatttttttctgacatatatcatacaatatctttatacaaatattttaatgtatttgagatatcaaaataatttgtaatattttctgttatgtaacctgtcatcatatagacttggcagatgtattagcaattaaaagcatttccatagaaaagaaatggtaagttattcagactgtacttttccccatcacttcattaattagcacagcatattaaggatctattttatgtagaaagtaatatgcaactaaatgtaatgagcaaagattttaaaatatttcagaaaacggtaattcatggtgcgtattatttttaccactgggttgatacatgtgctttttatctttttcaaatatctgaatcatcaactgaatttttcacttgcatttgagtatatccacttattggtatattttcaaaaaacaaacttttgtttctttaacttttattttaagttctggggtacatgtgcaggatgtgcgggtttgttatataagtaaacgtgtgccgtggacatttgctgcacagatccacccatcacctaggtgttaagcccagcatcattagctattcttcctgatgcttgccctcccgccattcctctgacaggccccagtgtgtcttgtttcccaacatgtgtccacgtcttctcatcattcagctcccacttataattgagaacatgtagtgtttggttttctgttcctgcgatgttagtttgctgaggataacagcttccagctccatccatgtccctgcaaaagacatgatctcatcctttttatagctgcatagtattccatggtgcttatgtaccacattttctttatccagtctatcattgatgggcatttggattgattccatgtctttactattgtgaatagaaacaaacttttattaaacctgctttctcttaaatactttatttttgcttgaatttaaatgaaattagtagttagcttcactttaaatttaaggatattcttgatgatcttaaaaatcaatctgttaaaaagatgtctaagtggaaaaacccaatattattgcttataatacaaagatatttatatttctatatgttttttaaaattatgaaatagtatatttttattagagttgagctgaatgttatttgaactcagagatgaactttatataatagcttaaaaataattgtatgttttacttgtttatcttctccctgtaacgtttattttaagatctcacttctagtttaaaatattcgattagatgtaagataagaagggaaatttcacaaacctttgggacacactggattccaaatgtcttcccatccagctgagaaaacttttaaaaatataattctgttctatataatttcatacaagtgttgttgtttgggatgaggaatggtaatggatcttttgtggtatcctttcccaattaattaatgcctcttttaggagaagtttggtcataagagttttacagagaacataaggctctgctagccaatggaggagagttaattctgggtatacaatagacaagtaattaaaggggacaagaggcaaaacagttttgcggagtgactaatacccactctttccaagggacatggtagaggagcaatgaggacaaattatggaaatgaggcacccttggcttgtgacaaaactctgaaatattggaagaatgtttcctcttagttttatgatcagtatgaattactcctctgtccttaaatgtttaaactccatttgccaggtgtcagccaggaaacccatttttagctgctaatttgtgttttctgtcatctgaaaattttttataagtgtacagtctgtttctctgaggttgaccacataaatttgaaataattgctgatcttatccatccagaagatcctggcagtttcacaactgtataggggatccagatattcctctcaggagtcttaatttgacccagagaaggagcaacgcatccagatccacagaagaaagaatggagcatccatcacttctgccaggcctttgtcaggtgaccctcagagccccattagaatgtcttctgtagggaaaagcttgactacattcttgggttaagaaaaggtgatgctgtttataactgctgagacagggggctgagaaagagttggatatatcagtctaaatgaaaccataaattgaatagagcatgaatgtttacccctgtggtcctatacccacattccctccaattttcagactagacattcatttttgtaatgattgcattcatgcatgtttatcttaaagtggtagaaatcaggtgattgattaaatccaaatgctctggatgagatttgtaacccagcagcactgcagactcagactgcttcagttaggaaagagtgaaaggtgcattaagagaagcagctgatcagttcttggcaggcagagtactgctgaagtaacaatttgcagtagttttgcactcctgtcagtgccagttggcaaactaatggagatgatggaatgaaagaacaaaatgtcacaacagaaaggagtgagttgaaaattcaaacattttcttatttctcataatcctgctcaatcaaaatgaaatcagcatcagtctacaaatgaaccaactcaatagtgaataagaggcagctatctgcacattttttttccaagtaggaaaatcgattaacaatattgtgaccattagcttgttcaaaacatcatcatggtttgtaataactcagaggactaatttataaacaagaatattgattttaacagagtaagttttagttgagaatagcaactgatacagatgttgaaactttacattaaggattccgatgttgggttgtagtggaatatcagtgccaaggcagcaaagtcaattttaaactattattttgctaatagtaaatataatgcaactcctatatatcctcctaatatagatcatctggatttactatgtaatctttgcctgacactgcagactacactatgaaaaccaattctatgtacacattacaaatcatatttttaacttcaaagatttaagtgttattgacttcccatggttcactcagttttaattgtttttgtaatctagatcgattacctcaatttttgactctaggaaaaaaaacataaacttatttatcaaaacaagtaggagaaaatcaaattagcacatcatatcagaagtacagcacaagataactaaatgtgaaaaacagatgctgccaaacatcataaatatcaccccagtaaatacactgaagagtagatccttttacttcagctgaactatgaaacagcagccattaacacatcaagaatgaactacaacttgccaaaggttgaaaagtaattttctccttaatatgattttagagtgcagcaatgtggtggcttattcatttttctcccattgggtatacaggataagttgttttaatattcacatgaaaatagataaataactttattgcatggctgctatagagctcagagccaaagttgtgtgccttgttattattacaaatacatcttaatatatgcttcctaattgcatttctggttcaaatctgatttttatattctcactttacattttgctattctgttatgtttttctgtatttataaatgattgaatcacattgaataatgtaggattatagctgtgtcaatctgttagtgcctgatagtattttaaaggcattgattacagggtattttatttatatgtagtgttatcctgcatatttatttcataaaggtaatcttctaattacttattattctacactaaattagtctttggaccaagcagatgtgcacggttaatttcataaacagacttggtaaaatgcagtctgtttcattgccccgttgatcagtaccgaagccgtataatgcagtaccatacaccatatttaaaataccttaaaaatcatattgttctttggcagaattaagccattcctaaaggagaaaggcctatcccattcttaagaaaagaaaaactgcataacttatcacctgaatattttctgaaaccttaaaataaagcttctacattggcagagtctaaattcctctgacatcagtttcagcagactggaggttagctattacacgccaaaatatttctcttgtatatttcctgttggagtaagtcctgttactaagtacctttttttagcattaagaaaatcaaattctgtttttgctttttcactggtgaatagaggggttgggatgaagtatggccatattttttccattgagtttttttgacaaataataattatgtatatatatggggcacatatgacaccttgatatgtttataaagtgtaatgatcaaattatagtaattggcatattcatcacctgaaatatttattatttctttgagttgggaatattcaaaattctctcttccagctattttaaaatgtacaataaattattgttaactaaagtcactctattatgctatagaacactaaaatgtaatcctaatatttaactgtaattttgtactccttatccatccagcatttctttcctgaagataaatgctgtaagaattttttttgctgaatcttcttttctgagaagtttctctcagcaattctctcctatgcttgttgtttcctacaggcagtttatactccattgagctatgagtttatctttgtaattccaaaatttgattgtgttactgttctgctagaaaaatgacaactgtctaatccatgaccagatgagagctaaaacccttagtgtggtgtggaatcttgctattcaggtgtgatcctaaaaccagcagtattaccatcacctgcagtctcctttcagaggcagaatggcaggcccagccatgaccaactgaatcagaatttaaattttaagatcacccagatgatatattttcatttaaaagctgaagccctagttccaaagaccactccagtttagccttatcttgcccctatagcctggtccttccacctcctccttcccctccttctactttgtctccactggctctcccttctctaggctcacaatggacttttcctgcctctagctctttatgtacaaagtgacctctgtccagaatttcctttcctgacctaagaaacttctacatagttgttatgaccgagaccagatatcctctcatctggagtttcttttcaaactatggcatctgacaaattacaattatttggttctgtcctctgctttatagcacattttgcttctatcttcttagcgctgattgtgttgttagaattacctgctaacatgtctccttcccccactagactcggtgtatgtttgttttttttgttttcttttgttttgtttttcctcttctctgatacttagtagagttcaggtacatagtaggcccctagaaaaatgtttgttcaggctgggtgtggtggctcacgtctgtaatcccagcactttgggaggctgaggcaggcggatcacaaggtcagaagttccagaccagcctggccaacatagtgaaaccccgtctctactaaaaatacaaaaattagctgggcatggtgacgcccacctgtagtccagctattcgggaggctgaggcaagagaatcgcttgaacctgggaggcggaggttgtggtgagctgagattgtgccattgcactccagcctgggcgacagagcgagactccatctcaaaaaaaaaaaaatgtttattcaataaatttatgaaagagtggatactataacagatctctacattttgctcaaggcaaatagaaacaagcattgtcacccaaaagaccacaaggatggtaaattggtagaaaggagagttttattggcgttatcaatttccaagctgggaagagaaagtctccacaaggcacaaaggtgctctctcttcagagaggggaagaacaagttggattttatgcctcacagggccagtatcatacatattcaacaggtttaggggaaaagctgtatatatttatgagcagtgttgagcacacgcacaataggtaaacatgcatgtaatgtacatcccatgttcactgtggggtggggtttgagcattaaaagaggtggaatttcgctctttccatgaaaaggtgaactataagacccaaagacagtttgtgtgcagcctctacaaactggctgaaactggcttaaggtctgccatagcttttcagaaaaaaaatgtaaggccagtcctctgttcagtcagggttgtagtggtctgggtagtaaatcagcctaatagctcctactgttagggtatttagcagggctgtggtttgtcttatggtggtagaaatttggaaatttgccctaccagccaagccctgagccttgacccataggaaacttttgtttccttaacttagggaccatcttaattgataaagagatgtctatttcagtttttcctatcataatatttactagagagcagtttaagcaatttcctgtgttattctctagaacagggtccagaaattactcaggaccaagttcagggctcagccactgtaatttaacccaggttggctttaaaaattagctgttgcagcaaagttgataatgtttcttaataaattccacctacgattgaaggcatacaacacctacatgtgaaaactacactgctgtcaattcatttagaggacagatgacattgtttgaatcacaagtaatatcaagctgcgttagaaacaaactccctccctgtactgtcaaagttaaagcaggaaatgaaacctccattctcacacagatttatgagggatgtattgtctgaggtgaaaccccaaagtaaatgcaaaggaaatttttctattttaaaatgcatataactgtgtgattgtgggcttccacttaactttcaattggaagtcattggtctacaatttaaagacatgctaaaaggcatatattgagagatgaatctagtggaattctatgaattccttccaagtgacaaatatactcaactaaaatcatatgctcatgaatttatgtaagtctttagcactacctatctggttggaaaaacatattcaaagatgtaagaaacaaaatcttattacagaagaacatttgcaattaatttcaatgataaagaatactaactttgaacctcaattatgcaaaatgttatatactccccaaagaatttcattttctcactagtagatttgtattacacaatattcactccatttttactattatattttggattttatcaataacaaatttgtgaaaattagtttggtatcttgtcacataagtacttggacaacatacttgattttgccccttggcccacaaagcctaaaatatttattcattggcttcttacagaaaaagttttctgacttctagaaacaaaagcagagattaaacattcaaaacaataaatatgtatttattaaaggtatatttataagctctgagaataaagtagagacattttcaccaattcagaacttgtattgtcaagtagtatgcttacctattttctaaataatttggtaaaatatataacaataatattggtatatatttaaaatatgtatgtgaattactttctgaaattggcatcagaataaagggctatgaaaattatatgggacctcaggtggaaatctacatataaagtattttcatatctggacagctcaggtctagctcagatttacttactttatggacattttacatctgctgtacaaagaaatttggtcttcaaggaatttgtcttgtcaggtagcaaattgttataattttttaaaagctgaaaactgccttcatatttaggtgtgctgaatacactctcagttcctgagacaacttctgtaattaaaccggcaagtatctcttcactgtttactgtacacttcacatcacccatagaggcatttctgaacacacaaggagggcacttcagagctggagaaaggggaaattcattttgtcacactatgacttatatatactttttaaagacaaagcaattttctctgtcgaaactttgattcttttagagctattatggaggagtagttacatcattcccaaaatttttactgcaaagtggttgcctgttagaaacacaatccttacagaactctcaaaaactggcagttgctgtaggtagtcaattgaagaggatcaaacacatctgttggcatatccatctgttaccaaaaaatctctagtctaaaattcttgctaaaaaaacttccattttgattagaacatcactgagaagcttacaaaattgagactgaaagtcattacctttatggagtaaatcataaggaaataaaaacaaatgtctctcaagtagattaattttattccaaatctatttttttttttaattaatggaactgttaccagtggagggtatccagattcttggcatttggaacaaagaattaggtaaagcccacaaacaaagcaatgaaagaaaagcaccgatttattgaaacaaaagtacactccacagagtgggagtgggcttgagcaagtggttcaagagcactggttatagaattttctggggtttaaacaccctctagaggtttcccattggttacttagtgtacaccctatgtaaatgaaatagtgatcagcaatcagaggctgaagtgatgttacaaagttatacttctatgcaaatgaagacttggcctgggaccagtctgattggttgtgagatagaaaccaatcagaggtcctttcatctgccatgcagaaaagtggggggtggggaggtggaaaaagagtcacgtatggtccttttgttacttgggcatggaaagttggagttttcattttggagtttggagttctaggaagctagccttaatcagccttaggttctctgcctccagaccctattctccttcctcagaaacaaaaaattttctttttaacttaagtacttctcactcattgtttttcctttccccagtgttctatttggatcccattaaataaattaccatcttactcacttgaggaatcttttacttctacctagtagttaacctactaccagtattttaaatttttatgccaaatttatgtgagcacataacagtatataccagtatgatattaaataattttaagtctacttatcattgagttgattataggtctcagaaataaattctagtatcacgtatagtttctgaaaattatccttaaaggtagctattcataactctgagagagcactgtgcttttggaagatttctgaaacagtctttttactacatctgattacagacattctgttatagcctccatctatcagtaatcacattttaaggtatcatttgtcaagaaaataattggtcaaaaacattacaaatatcaaacatctattgaaaatatatacagcagtacttattaaaatggtgctgttagataacaatgaaaataagaaaaatacgtttttgaaaaaatagctatataaataagatgtcattgttctgaatgactattgagccatagatgtttgatctcttgcttaaaaggtttacaaactcttatcagcaatcataagtaacatgatgcactgagatttagcatttttaataatcctgatcttgattctttaatttcttacgtcatgacaaaggcagcagtcttaatttatataaaaagatttctaatacataggtctcacatctcacaaagattcagaccagctctcagagaatactttttaaaatacaagtagttacattttaaataaaattatttagctgttttgtcaatcttttcagattgttaacaacttgaacaaaactacaaaattatttcctttatggttatatccagtgactaatattagtatatattcttttagcaaaatatactaacttaaccatatattgaattgattcatttattttcattttgcttactaaataacactaggcaaatcttgtgatttactctgtcttagcaagtttcacgtatacaatacattattattaagtatactcacgatgctgtacattttgtctctagaacttattcatcttataaaccaaaatttgtactctttgaccaacatctccccatttcctcagtatctctccccactccgtaatcacactctgctctcagtttccatgagtttgactctttagattccacatatgagattatatagtatttgtctgtgtatagcttatttcactaggcataattgtctcaaggttcatccatattgttgcaaatggcaagattttcttctttttaaggctgaaaaaaatatttcattgtgtttatgtgtatcacaatttctttatccattcacctgttgatggacacttcagttgtttccatgccttgtctactgtgaataatgctgtaatgaacatggaagtgcagatagtttatgaggtggtggtttaatttcctctggtatatacccagaagaacagattgatggatcatatagtagttcatttttatttttttaggaaccaccatactatttttccataatgtctgcaccaaattaagtttccaccaacagtctataagagttcccttttccccacatccctggcaacacttatcttttgacttttttataatagccatcccagcagacgtgaggtgatactcattgtgtttttcatttgcatttccctgattagtgatgttaatcaccttttcatataactgttgaccatttagatgtaagctttcgaataaatgatggcctttgcccatattttgattgagttttttggggggtttgtttttgatttttgctattgagttgtagagttccttatatattttgaatattaaccccttctcatatacgtggctggcaaatattttctcccactccatatgttgcttttcactttgttgattgtttcatttgctctgtagaaacttttttgtttgatgtaattccacgtgtttatctgacttttgttgcctgtgcttttggtgttctatccaaaaaataattgccaagatgccaagattgatgtcatacagctgttccctgatgttttcttgtaggaattttactgtttcaggtcttatgtctaagtctttaatccattttgtgtattcttggagcttttgctgaagattagtttgtcttatatacataggtttatttcttggctttctattctgttctattgatctatatgtctctttttatgccactaccatgttgttttgattaccatagctttgtagtatactttgaagtcaggtaatatgatgccttcagtttcattttttcttactcaaggttgctttagctaattagaaacttttgtggctccatatggattttaggaatttttttacctgtgagaaaaatgccattcaaattttgatagggattgcattgaatctgtagatcactttgggtagtatggactttaaaaaaatatttagttgacaaagattatatatagtcagctatatagtgtgatgatttgatatacatatacattgtttgatgtttatcacaataatatcaattaacacattcatcatcacccatgctttacatgagagcctcaggacttgtttatcttataactatcagttggtagtattgacattttgacactttattatttcacttatttgtgtcttctataatttcttttatccatgttttatgtgttcagtatatagaacttttacctccttgtttaagtttatttacaagtattttattcttttagatgctactgtaaacagaattgttttcttaacttattcatcattagagtgtagaaactcaagtaatttttgtatgttgatttgatatcctgcaattttagtgaatttgctcattagttttggtgaattctttagagttatatatatatatataggattatgtcatctgtaaacaaagaccattttacattattctttgcaatttggatgccctttttttttcttttccttggtgaattgctttggctaggactctcagtgttatatggaatagcagtagagagagtgggcatccttgtcttcttccttatcatccttgcatttttatatttttaatttatattttatttattccaaatatattgtcagaatttaatgttaactattatactgataaagcaaaattatctgccacagaaacaggtaatattatccaaactttattttcatataacataatatgattcttttggatcaagggctatattcctgttctctacaatctgagttgtttattttatattttcttttgggttttgtgctttaaagagaaaagatgtttattattggttaagggctatcacacacacacacacacacacacacacacacacacacacacacaatttccagattttattcaatattgttctcaagtaaaaagtaaatctgtgtagaaacccatatcggttttgattgtcaatgttattaaagcatagaggtgaaaagccacactttgaagtaaaagagatttaagatgaaatccctgtgctactgttagcaatgtgcccttttctgagcttcagttgccatcaatgcaatggggataataatagttcttgcttcattaggagggtgtagatatacaaatacaataaagtgcttggtgaatactaagtacccagcaactgttagctactattactctcacctgcttttgagcaactgccagtattaaactcactgtttgagaacttttattattttcatatataagcttattgcttattgaaaaatacctttcattttcctctactatttctagggatgctaattatatttaccagaatatatatttaaaacaacctaaacagcttattagaattgatttaatgtgattaagtgatatgtttattccacattatttctatgcagagaaaagaaatttcttaaggaagaaatatcccaaacaaaaatatgttctataatctatctatctatttactttgcgtaaccataagaccagtgttcattcatgaaaatagttttcttgtttggtgataacatatgatatgtgataactaagactcaagaatatataaaaaataatttaccttttcaaggaacactataatttactgaaaaatatcaatatgcagacttgtctactcaacctgcccaattattaatcctttaattattatcaatcactgggagaagaataatacaactgacataatcttctctaacatttgctacagtgccaatactttttcaatagtgtataagcctaaatattttcaaatcaacaaatactcttattcataatattaattttaagtgcctctacaaccttcaacattaattaaatcatgttaaaacacttgaaatatacaaaatatagattttcagatcattatttccaagaagctattttattagtcagtttccacactgctgacaaagacaacccaagactgggtaattataaaggaaaagaattttaatgtactcacagttccacgtggctgaggaggcctcacaatcatggcagaaggtgaaaggcatgtcttacttggcagcagacaggagagaatgagagccaagcaaaagaggttttcacttataaaaccatcaggtctcatgagacttattcactaccatgagaacagcatgggggaaacagcccccattatttaattatctcccaccaagttcctccaataacacatgagaattacaggaggtacaattcaagatgagatttcggtgaggacatagcccaaccatatcattccacccctggaccctcccaaatctcatgttctcacgtttcaaaaccaatcatgccttcctaacagttccctaaagtcttaactcatttcagcattaactcagaagcccagagtccaaagtctcatcggagacaaggcaagtcccctccatctatgagcctgtaaaatcaaaagcaagttagtttcctcctggatacaatagaggtacaggcattgggtaaatacagccattccaaatgggagaaattggtcaaaacaaagggggtacaggccccacgcaaatccaaaatccagtggggcagtaaaatcttaaagctccaaaatgatctcctttgactccatgtctcacatccaggtcatggtgacacaagaggtgggttcccatggccttgggcagctctgcccctgttgctttgcagtgacagcctccctcttggctgctttcacggcctagtgttgagtgtatgcagcgtttccaggtgcacagggcaagctgtcagtggatctaccattctggggtctggaggatgatggtcttcttctctcagctccactaggcagtgccccagtgagaactctgtgtgggggctgtaaccccacatttttcttctgcgctgctctagcagaggttctcatgaggtctccatccatgcagcaggcttctgcctgggcatccaggcatttccatgcattctctgaaatctaagttgaggttctcaaacctcaattcttgacttctgtgcacccacaggctcaacaccacgtggaaactgccaaggcttggggcttgcacccactgaagccacagcccaatttgtaccttggccccttttagccatggctagagttgctgggacacagagcaccaactccctagcctgcacatagcaggggggccatgggcccagccgaccatttttaattcctaggcctatgggcctgcaatgagaggggctgccacaaagttctgtgaaatcccctggagacattttccccattgtcttggcaattaacatttggctcctctttacttatgcaaatttctgcagctggcttgaatttctcctcagaaaatgggtttttctttcttcataaggctgcaaattttccaaacttttatgctctgtttcccttttaaaactgaatgcttttaacagcacctaagtcatgtcttaaatgttttgctgcttagaaatgtcttccatcagatacactaaatcatctccctcaagttcaaagtcccacaaatctccagggcaggggcaaaatgtcaccagtctccttgctaaaacatagtaatagttacctttactctagttctcaacaagttcctcatctccatctgagacaacctcaacctggatttcagtgtccacatcattatcagcattttgatcaaagccattcaacaagtctctaggaagttccaaactttcccacatttttgtatcttcttctaagccctccaaacggttccaacctctgcctgtcacccagttccaaagtcgctttcacatttttgggtatctttacagcagcaccctactctcccagtgccaatttactgtattagtccatttttaagctgtgttaaagacatacctgagactgggtaatttataaaggaaaagagatttaacggactaacagttacacgtggccagggaggcctcacaatcatggcaaaaggcatgtcttacatcgcagcaggcaagagagagaatgagagcaaagcaaaaaagggcttccccttataaaaccatcagatctcatgagacttattcagtaccatgagaacagtatatgggggaaactgcccccatgattcagttatctcccaccaggccccttccacaacacatgggaattatggaaactacaattcaagatgagatttgggtggggacacagccaaaccatatcaactatgtaaatgcaaaataacaaacacacatcttaacaagacttcattcagctatgttaaaaagaaacagcaataaatgaaaaattaatggtacaaagagatgtgctagaattgcaacaaatctgacatttctgtgtttataacaagctcgtatatggtaaatagttgataaatgctatttatcctagaagaaatagaaagaattgggtaaggattgtcttggaagggaagagagatatttagacagaaaagaataaaattacagttggagtgttattcaaaagatgaaggatatcagctaaaaacaacaaaaactttcctttaccactagcacactagttgccatcactcttatcttctcttgtttataattgtctatatcctctaactccacttcctaatcaccactcaacccatttcaatttggtttcctaccccatcttaccacataaataactctttgtaaagtcaccaatgacctctgggttatgaaatccagtggacatattttagtcctcaacttgaccacttagatgtgggtgactccattgaccccttagttcttgaaaatcttctgtttcttcagcttgtattgctctctgggcctagttgtttatcatgcttctaataactacttctctgtctctttttgctggctcatcttcatcatccagacattaaatattggagttcctcagtgaatagtcacagactccccccatcctttttctctgttcttctttcttttcatctcctttccttattctaaattttctccctaagccatatcattcatacctatgactttatgatctatatgccaatggaatcttcacttaggtctctcatccagaattctctgaggttcagacttggaagtgtaattgcttacacaatattagacaattaaggatatctcaaaaatgctttaaaagaacctacaacataatatgtccaaaccaaatgagttatcctcctacacacaggcatgcacacatttcgcacatatcaaaatctggagttctaattgaagttcctacttcaattcaattttttaagtcagaaaacaaatggttgtttcaatatttgccccttcctctacctccccaccatatgtagtgcgtcatcaggtagtgtggacctgacagtcagtctgtcttgaagctgtctacttatttttatcttatctataacagagataacattgtaagtgttcattaaatccagaggcatcttcagaaattatttattgttggttaaaaatttaacatctcttggtcaggtaaaagaggttagaaataaatgcaatgaggatcaatatactaaggaaacagataccttgaagggatgggaaattgataagaggtagcaaccagcagtgagtcgataaaacagaaagggatttgcaaagatttcacttgcagtagattgcatgtgaatcaacagtatatgtctgctgattttttaaaaatcaataaaggatccataaataagaatatagtacatgaactctcatactaattatttatttcatattgttcttgatatatatttactggggacaaatgcgtatgacataaaatttgccattttaactatatttaggtgtgtaattcagtggcattaattacgtacacagtattgtgcagccattaccactacttatttccagaacttttttactacactaaacagaaacactacccattaagcaataactttctactagtaacctttaatctattttctgtctctatgaatttacctattctaggtatttcatataaatggaatcgtgaactatatgtctttttgtgtctggcttattttgcttggcatgtttcattaatgttgtaacataaatcagcacttcagtgctctttatggctaaataatattccatcagtatctatatattacattttttaatctattcataagtttatgggcacttgtgttgtttctgccttttggcttttgcgaataacactgctgtgaatattggcgtacaggtatctgtttgaataattgttctcagttatttttagtatacaccaaggagtgtcattgctgggttaaatgataattttgtttaactttttgaggaaccatcaaactcttttccacagtgactgtactattttacatttccacccacatacagggttcctctcattgttaatttttcaagtatagtattaattcagtgtttgataatttagaaatcataaagaatttgttgcaatgtgttaacgacattaaagaatttaaacacgaaggttaaaaagcatcagcacaatgacctggaaaaagacttttagtgtaaagaaggctatggaataatctaatatttattttcatttaaaaaaagattacatttaaataatgccctgtctttcatacatgtggattacactaataatccatatgaatattgcatccaattcaagttgttgttagggaatcagaaacattactctgatttagctactttttgttttgttgtattttgttttgtccaaggtccaaataagcaaaagtattcatcttgaatttactggctagattagtaatttgtctatggaaaatatcagagttaattgcctgctctaaaaataagttttttaaaaaattgacctgtttgaactaggtaagataattgatcacatataacgaacgactagctatctggttacacttttttctattcagtgccagaacaaaagaaagaaatttagtttataacacattgtcattatgaagttatgacagaaattatctgttttctaaaaaaaaaaacagttatattgtttctatctttgtatagaattagaattagagagatagttttgtaaggcagatagaggatgaataggatgaccttttaatttcccattttgccttgtgatttcttgattgttctgcactactgacatactgagtcaattttattgggatacaggaattttcattcttactgcagtgtatatactcacattgccatacgtggagaaaacacttgaattattatatttgggaaactaacaaagacttcagtgtcttataaacataggaagaatatcttgtgaatgcatatacattttccaagtctataaaaaactttagctccttgttttgatagactatcagcatatgagattctagagattgtataaattgggcagttctgctttaaaaaagctatttttttcctaatactatatcttcatttcctacaaattattttatctagcatagcatttacactgacgttcatggtaagatataaaaacattctccttggtaaatttaagaatctttttaaaatgtctgaagtagaagagaacataaagttttccaggttctctagctgaaagaaagaaggaagctctggaaattttctttttcttttgtgctaatccatgacaatatcaagattcttcatcagtaagtgatgctgaagcacccagaatccagggttcagttcatgggtattgaatcagtagtgccttaatcctatgtgcatttaacattaatattattcatgctttatcataatgtaattctctaactgaaaaagttttaataactccacagtaaatagagaataaagtacaaacacttttagtcttttttctcagaatatttggaactcattttaactctcttttcagccttatatttcactattactcatcaaatactcagggtataaaataaaccgtacattttactctgccttactccctacatgcccttcatgtaatcccagccaaatagacatgcctaactctttgactccacctataaaagtcctacttactcttcaagtccaatttcaagatcaaatgccatcatttccagtaaacttctctccgttcactgaatgggaaataattttcaccacattgccactaaaagaacttttgccactattgatgtatttttacatgttatctgaaattaaaattaggctttatgtgctttattttttctatttgtgagctccatggggactaggacaatatattcatcttggaacttaccaaaacaccaaaaaaagtgtcatgcagatagggagtactgaagtagagtttattattttgaattgaatgaattttacattttcaagcatagattataaaatgttatttttaagaagagtaaattttattattcattaaagaaaataattaacacatgggtaaatcacggacatcttttgaaaacagtgtaggctaagtgttgtcagtgttttagaacagaaaataacatgaaatggtaactttctgaaaataactttttggtttattatcaagttatacatttattctataataagaaacaaaaacatccataaaaatgaaattaattttatttccaatatcaacaataactcccatatgtaccaagtttcacttctaaccccacaaagtagtacatagtttatgtatttttctgtacatatattttatgcattttttgtacatatatttttgtgtttaatggcagtttatcatgaccttttttatcttgataaatatgctcctcaaacattatttttaatgaatgcctagcattcctttcttatctccataatttctatttttggacatttcaaatatcctaattttttactgtatttaaattattttagcttcatttatgtaatttaatcattagctcatcttggactattttcttgagattaattcctaaaaatgcaagtgttcttcccaagacatatgtgtattgttaaagctattgatattcactaataacatgcccttcaaacattttttattgccaatttcttttggcaacagtagtattttggaatgcccaatagtgactgtgttaagcaccctatttctgacacaagttgcattctctaaagtgttcctcaaaattgggatatggtacaattcttatctattagatattgaagtacttgataaagaaaatgcagttggattaaggatataataacttggatccttttttaccttccattttctgcatatatgttttggaattagttttattatggcacatgaatggcatgtagtatatgatgacttagtattgcaaattcagaaatgccaactgaattaaagaagctttctagttctgaagttaacttgcctaggttcaaagtgtttcctgccacttaccatagtgtgatgttggacaacatacctaacagctcttagccaccatttcattattcacaaaatagaaataatgacaataccttcttcgaagggtggttgtgagggatagatgcaataatgcatataaagtaaattgctcagtgccttccaactagaatgtcttcacaaaataatagctgttattaattttacctataatatttcaaaaatatctgcttaaaatacaggctcattacttgatagatatgctcagtaggtggttttatttattgtagaatgtatattacataagggggaaatgtgaaaaataatattaattttatgtgtacttcagtaacacttcataaaatatgtatataatcaacctctctatctcatgaacattgaaataatttggggaaaaaacacagctttgtgtcactttagagtaggtcaaatgaaaagagtatgttgcccaacattactacatcaattaaactttatatgaatatttaaaggattctggtaataattcatgtgacaaaattcaaaagcagccttttcaataaatgaaaagtttccaggtcaaatctcttcccgacattcatacatattttcttgtcttgcgttaacatgagataacagtcagggttacaattttacctataactaacttaaagaaataagacaggtaaaaagaaaagaactgatttcatgacacaaatatagaattaaactgtcaagattcgaaatgttcaatatacctcatttagagtaagaattttaaattcaaataattttctttgaatatgataggaaatgaatgtattggccagaaatttgtgacaattaattgcagaatggctgaattgtaatgaaaggctctaaggaaaaaaaaatgatgaaatgaatgtgctgtttgctttcaaatcatttacagttgaataatttatgttatctttaattcatccagttaaattatccaagatgaatacaatatgaatagaagaggtttaaaattgtcaggtttttgcattaaaatgtttgccagtaaccactttctattttttattaccattttaatggtttcatatattgcaatatgagttagaagactaagctggagtatacaatgtaatgagtttccagggttataaatatttgacctatgtcttgagacattaaaagaaaacctcttatgtagataggttatgtattcactcaaagaaaactaacctaagtggaaattactctgatctgccccctaaaatttcacccaccatattctttccctttctctgaataacagcattcttcagttgtttatgccaaaaactttggagtcaacctgattttctctaaacgctacttctgtcagcaaatcctgtcagaagctacctatgaaataaattcagcgtacttagaaatgcctactgctacccccttttaccttaagccaacatcaacattttatctcttgttctctctctggattgttaaaatagtctcttagttctccctgctttagtggttgctttcctttgctttcttttcaatacaaccatcagaatgtgccttcataatgaaagttggaaagcgttagtcctctcaaaactcccggtggcttttccatcttgctcagagtaaatgccaaaggtcttataataaacttcacagcagtatactgatctagacccgctgctattcctctgattttatctcgtagcactatctttctttttccctctactctctcaaacacaccaagcatgccctcacctcaaggctatggcatctctgcatataaaacaaagacatacaatttctcatattccttctcattctactaatgaccccaccattgctttgattcttaccaagagagccctgtaatcaaggtctaaatgtgacttaatttacggttcatatagcattctactaggttctttacctgaagagttgaaaacaagactaccttcctgtaagcttacttaacacaaagaattagatactgagtcagaactcaggtttcgttaatgtctaattagcaaaagaacaagataaagtaggaaggctagatccaagtcctagttgaactaaatgattactgtacatctgaaatggaagcaagacaaagaccaattattctaaggagaaacaaaagagggcagatgtcttaaggtgaatccaaaactaaaaggtccatatccaggccgtaatccaagcagaggtgtgaacaggatatgagaaaaaatctaatacctgtcattggtgaaagtacttatgagtggtcagttggtactaagaaaggggcgtggagaaaggaaatacgacagcaattgtacccactttgggatagtgatattcataaaaagaatttccttgggagcagggataaacatcagaaaacagagttttagaaaaagagaagatcaagaagtaccacgttcgatgaaacactgagttataggacagtgagtatcattgatagaatagaatttaatttctgagtgtctgggcagccagctccaagtctgaattagtgagaagtcactattcccatcattaatgtccagagtgacccaaagtttttgggaaaaactcaagtagtcccagatgcagtattccacaccacggaatgctcatagaaaaaaaaaatgagtttcattttagggatcaactacaggttgcaattttcaataggatggtcaagaaagacattattgaggccaggagtggtggctcacgcctgtaattccaatactttcggaggttgaggtgggcagatcacctgaagtcaggatttcaagaccagcctggccaacacgacgaaaccccgtctctagtaaaaatacaaaaattatcgtgccacctcactccagcctggcgacaggtgagccgagatcataccactgcactccagcttgggtgacagagcaagactcgatctcaaaaaaaaaaaaaaaaaaaagaacaagaaaagaaagaaattattgagaagatgatattaaaataaaaataaaaggaggggaaggagagagggagccatggagatatctaggagcagagcattctaaccactggggacaactgcaaaggtcctgtcttaagaattgcaagaaggctagagtaggggagcagagtgaggagaaagagaagcatggaaaataggcttggagttgaggcacacccgtgggaccctatacacaaccatggttaagactttgtgttttattctgagtgaaagaaaatgctccgagatggttttttaacagaagaatacgtgatctgtgtgctggtgataagcttgtaagcatgtcctttattcctggactaaccactgcaaaatggttagctaaaagctgaaagagaagtaaatgcaggcttcattttttttgtttttcttttttatgtgataataggttcttagtatatgagcttcaataatttgtgcatagtgttttatatacctctcccagacatactatttattatttagctttctaattccttctaattttgtagcttagtcacgccaaaactaagttaaatcacatctatggagcttttgtatgtgccagacattgtgctgtatgctttatatgtagaatctcatttactcttccaacagcacataataatcatcaccaccattttattgatagggaaactgtaaagcacagaacttaggaattccagagcatgtatcttcaccggagttaacatcatacttgtttttgtggacctgactgtccccttcagatattttctttaggttgcctaatatttcgttacaagagagtacattctccaggctgactagatgtctaagcgagaagacagtctgcattttcagtcttttgttatagcatgagatgctgcctgggacatagcatagtcagtctagtgattcaacatatgtacaaatgaatcagaacacagggttcctatcccagctcatccatttgccagctgtgtttctcactttggttctttataaaataacagtacctaaagtaggattcaagccctattagattttgagatcacattttaagagaaagaatacaaaattaggcacgaaagtgagtatttattcatgtagagaaaataaaacatagcaaaatatgaattttaaaaagttaacaaataccacacaaattataaactgcagaaaaaagtaactatattgttgttttgtaaataacatgatcctctagagtttttttcattttttaatccatttttggctatatattcttcaattgcctctgcacatgacttcaatttggtaatatcacacaactaattacacggtaaaattattttgggtaataaccccagtattgttctcttccagccctgcagtgaaagctgcccatcagactctgaggaggctgcataattaaactctactgtttcactagctaagctgctgaaacacagtaaaccaagtcctgggaaatttctttttcatggtatacttaacaacccatgaactataatgtgatatggaaatccagtttgcaatgctctgttcttcataaaacacagagtggcattattctcaagtacagtttataataagcgagaggaaggagatacagctggtaaaattttgttctactcacagatagctaagaaacttcatgtgtctccataaaggagtaatataaaatttgtgcaaataagttgcaaattcaaaaggaactcatataaggaaacatatttgtgatggtatacactcctgaatatttaacattttgatcaccgtgaactataatatataatctgcattttatggttttctggatgcttggaaatttcaggagtatttaattttaaaaagattgtcaacatgcagataaaaaatcagattattttacatctataagtgaaaccttgttatccccttcatttgaggaaatccaaggagttttaaacagctctactttactggctatctctatacttaagccactagttggtttttggtttgtttgtttttagcatttaatattagtgtgtgttttcccataacttaattaccaaattaataaaagggtcattcttcactaagtatcacagtagtagtgagtgaagatagtcattctacccaaacagcctttgttcgataaggttaagtgcagtaaccagaagttggaagtatagaagatgtgctttgaaaatgcatgctagaagacttcggtcacagtgacatgacagaggattgttggaaaataacatttgaagtcaaactttcctgaaagcccaggcatgaggcaaggctttctggacaaaagtttccagcagaccacagtctgacacaccatcatgaacaagatcagattttaagcctccaagccaatcaagaaattaccttgaaatgtgcgcagtgtattttaagtaaaaccagtctctgtaggcactcaatatatgtttgtttaatgtaattaaatttgaattaaattcagtaaggctggtttcctaatataaaatatgaaaaggcttattgaatttcaaaattatttttatggctattttaaagcaattactaactttgataataaaagtgtgaacaggactgtaattcattattaggctggcacttcttactgtgggcatttgtcaataacttttctggccaagatatggggtgatctttggaatacacttgagtaatacatataaaaacagtttgaaaaaccaaaagctgtctatatttttttccactgatctatttgtcaaactatgttgattcagaagcactactgaaccaaaatatgccatcactcctaagatggaaaaaaaaaaaagcaatcccatcattattatgtattgtgggaatacatatgcatgggagtaaaaccctagctatttgtgcaagtttgatagacagctaataattaatttgatagttgttcaaaaaaatcaataccaaaaaactgaagccaacttctgtaagttgtggggcttcgtatatgggccatctgaaatcgccaaataacctggacaatttaagttattcttacataattgtgaataaagaaaatcattttgttctgagttcaagggtttagaaaaacagagcattgccaacccaagaaaattcgaaacacaatgggaacaagaaatctatatgcaaaagtgtctggcttgaataaaaaagtaaatctaaaagctgccacagtatctaatgtcctaagcctctcaaagaattagttcatggatttacttactgtcaaggattgaaacctacctagacattatttaggtagtaacaaataaacacacaaacaaaaatatatttgttggttactaaggaatgaaatttacctataatagttacccagagtttcagttcctatttctatgtgagaagaacaaaataacattttgtttactataaagattgaaatggtaacaacctgaaaagaggaaaaaaagggaaggaaaatagggaaggagttctctgtggactctccttcaactgagtgtgtccatgctttgtgctggttccctcagtatgggtgtcctatgatggtacctggctgtctttggagaatatgaaccaagtactaaagtggttttggaaggtttgcattgttgagagtttcaaaaatataatacctctgttttaaaaaaccaacgccattaagtttcatgcctggtttctataactgaagtactctgaaaaaattcaaatcaattttttggtgaataactaaactgaataaaatgtcatcaaagtcttctcaagacttattctaaaattttgtagtattcactcacatacaaataatgaattatgatgatcggctagctggcaaagatgtgcttttagccatcctgctgtccttcctggaggtaccattttacccaggagagaaaatcttcaggaactgcagctttattgaactgccaatttagctaatttttatttatttttcaaactttacttttatcatccaattgagagacgagcagcagatggcttctgcctccagctcagctgccctgctataaactaaactggaaaacatggtagtaccttggttctcccttattcgtaaatctcactgtcaaatcaggaaacgtctactggcaacctcagagtatttcctttaaagacagtcccttaacactttcctactctcgtttgagcagcttgtcttgtcagataatgaagaaattttttggagcaaattattttaattccgaatggcagacaaatcaattactttgaaaatattggtttcatattgaccaaacatgttcaaatattaaacacacataattttaaatattctttttcaaacagggaggtcaaggtttcattcaaataaggtttgaattgacgttgttttgcttgatagaatgttacctggcactcactgagcaaaaagtcacttttgtatttaaagaacatgtaagctagtattttatttcactttgctattgtggttaaattcaaatttgagaatattatttttagatcacttcctagccaaaagcattgtcaagtgatgatgtgtactatttaaatagaaagcacagaattcacgacattttacctcagtatttggttaattgtggcaaattaattgtcattcaccaaatgcttgtgacctttcttttcttcattctcccttccgtccaagctgctgttgaaaacagagactgttgttatcacttaataatactttggccaagtgtaaatgtgatattatacgtattgtgcctaggatcctaactgcgcaccttctttaattcatttataaaatttttaggctaatacgagctttgaatgcaaacacattctcttcagtgatatatctgtatagtctaattaaaaataaaaatataaagaccttaataaatactaataatggaggtcaaagggcacatagtgaagtgcagttgagaaatgacgtgacctgtgtatttgtcttattcctgctatatcgcataaacaggagaatgaattgaaaattgtaattaagatttattccattttgttaagattaaaaatgagcagtcaaataattctttctctgagagaagagtgtatggtaggtccattgagggtgtctgttgtatcttaaaatctattcgaaatgtttgggtgaattattgtctaaattgacagatgattgcttttgagctaacaaaatatttctgttagcatagctaaagaatatatgttaaggaatatatgctctttgtaagttttgattgagtagataagatgatacagacacatgaatcaggaaacaaatcaacaatcaactggaattacaaccaaatctatgtacttctgttgtgagatctttttacttgcaatcctttgcaaaacgtgctgtgcacaatgtagtaagtatgcttgtaataaacaattaaaggagcttttcacgtgtagaagtgcacgcttaatttttgttaaatcatctcaataaatacttataagtgaagccaacatgattttcttaagttttttgaaaatgtgtgtacctataactgctgtgctatttgcaagaggcagtatacacacaaatttgatgatttcattctttaccaaatactatatttagcacattaaatactaagaaatagcactaaaatgggccgggcctggtggctcatgcctgtaatcccagcactttgggaggccgtggcagacggatcacttgaggtccagagtttgagaccaacctggccaacatggtgaaaccccgtctctactaaaaatacaaaaattgctgggcctggtggtggatgcctgtaatcccagctactcgagaagcttgggcaggagaatcacttgaactcaggaggcggaggttgcagtgagctgagattgtaccactgcactccagcctgggcaataaaagcgaaactccacctcaaaaaaaaaaaaaaaaaaaaaaagagagagagagagagagagaaggaaggaagaagaaaagaaaaaaagaaatagcactaaaatggacataaaatatatattggtgttttagaactaattttacaaagactgaaatttaaatatacactcaattttaaatttttaaaataatattcagaataatgggttcatttgtaaaacaaaattgtttgtaggcataaaggattaattgaaaaaatcagtcatgcaaggaatatctcttatatgtagaatgagtattaatttccaaatgacattttaaagaaacctcttataatagtaccctttaaatcactaaaaattaatctagcatacagtcacatgtctgttgttttgtactagtgctccgtctacatttatgtgtataaaattttttaattcagttgaaaatctctttatataaaaggctcaaactgtcctttgaaatgaaacaggcccaatgaatattccattgatttcattgtaacattaatgggggaccaagtcatagtttgagcagaagagaaagttaagtaatatcaaccgctttgtttttcatagtagaacacccatccaaatgccattttcctgccagtaagtgttctgtagagcagtgttttaaattcccataataccacttctcattatgaaaacctcttcacaatttaaagggtaataacagaagactaagccactacaaatgtccaaaacatcttttaagttagtcatatgacctctgaatatattaatatcttaacctcaaattagggattatgtcaaaaactaggaaggatacttctcttacatacattttatttgctgtatatttattatttatttgctaaatattttgtcagttaattatttcttatttattgtatatttaaagtaagttactaaaagctgcgctcccagagtgcagaaagcactaggcctgaatttagaagtggtaggttgaataactgatatttctagctttgccattagtttattgtgaggatcattttggaaagtcttttgatctttgcctctacaataaattagtaacaaaattatctgtattatgaggatttgtgttgttgttgtttctttatttttgtttgaaataattgttttctatatttcttttgctgcaggaaaagttttgggtttattgtgttttctcataactgtataattttattttattttaatttacttgtgtgtctgtgcatggagatgagggccttgctttgttgcccaggctggtctcgaattcatggcttcaagcaatcctcccaccttggcctcccaaagtgctgggattacagacatgagccaacataactgtataattttaatattgcaaggaacactcttaaaaataaattaggaccgggtgtggcagctcacacctgtaatcccagcaatttgagaggcttctctatggcttcaactattttctcttacccaagttgccttccaagctttagatttgtagactctaaaggaagaagcctaataggactctgcagtctacacagaaaggaaagctggctgtggataactaagaaccacatggcaaaaaaaactagtcattgggttctagaggagaatacatccatttctgttgctagtgggatgctggaatataaatttttcaaaaatcctttgtttaaagccaaaaactgctaaaaatagcagtaagtttgaaacttaattattggaagcttaatagctccctctccaatgtatacactaacaattgccaactgatgtcaacacaaattgtgaacatgcaagaaaaactaattgttctatattattttacagttattattgattatcatgccctttgcaaatcaagaaaaagaaagtgtaataattcttaaggtgaatttaacagttactagaggagaggaagcatgtttccaaatactttcttaatcaaacattaaaatcacaggcttcatttaaagggtgtcaaccaagtataaataaaattcgactaaattttcaaacatgatctctgatcacatatagatagactggtttaagaagagacttctttcatcaagtttgaaaatatttgttttttttctctccaagggcatcctcttcagccacaaatagcttaagagagggtaaaaattgaggtgtgtagattgaccaaacacacacaaacacacacacacacactgctaagaatattttgtcctctggcctctggtagaatattttctaccattggcctctggtagaattttattgagagtattcagttaccacttgaaatgcgtttgggtcagtgcctttgaaacctagctgtatgtacatcacgtggaatacaagtaggttgagaagctgcatcacacattaaaatgagaacaaatgcaaagaaacatgaggagcatgataataaaagttgtatagcattcaacttttatctgtgttgtaagccacaattgtactcaaccctctcagtctaagctgacagactcaaaaacttcaaccagaatgaagtatctcaacatttctccttttcaaacacatatttaaataaagtggataagcttcattcaaaccaaattaataataagtacatccaaaagtaaccacattaaaatgtgacaatgtagagaattatcagaactttactgctaatactgtgaatctataaacaacccacaggcgtgagaaaacacaacaaaaacctaatcctggccatagcaacatggatccatgtgtctctaagaccagcctcaacttagatgaaaacgcaagtttcttttcctttcacttcgcttttttttcttttgatttctagtcttgtcttcttactgttcttttccctcttctttttcttttttttttaagaaatatattccttttaacattggagttctccaggtttaaacgtaatcacaaaggcttttaccttgggtttcaaccctaaaatcacagcagtggatctagaagtggcaaataaggtctgattgggccggggtctactcattatcagatgatacaattttctatggagattcctggtgccgtctcttttgtctggttctcattcagcaacttcaaagaaagaggatagaaatatcttacgctgttgaagtcttggaattcagatttggcacttgcatccaaatgtttcttgtactattttctacatggctaattatggctacgttttaaaaataaggaacacctagctttctaatatgtgatgagagatgggatattattgaaacaagaaagagtctgtttgggagtcccaaatgaaccctcttttgtggacaaataatttataagaacatagaaacagaatttgagatgtattcttgaaaaaagttattaaaccagatcaaatactacctcgaaataaatacatagcactaaaacatcactatctccttgttttatttgtcttactacctgctttatcatctaccaacatttgtgtaacatctatttcttcccagtaaaatgtgagctgcaagagatcagggacacactgggtaaggagagcatctgtcttaaatgatatctacaaataaagctaaaagagaacagctcaacagacagcagagatgggcatctgcccaacaaaggccagctggagaaatatcaagagaaggtttctaattaaactcttaatttgggggtctatattgcttttctattattgctgtaataaattaccataaacctagtgggttaaaacaagacaactctattgtcttatagccccggatgtcagaagtccaaaatgaatcttacagggcgagtattaacgtgtgggaagggctgcattccttattgatgctataggagagaatttgtgtttttgcctttttcagcttctagaagtcacccccattccttggttcatagcccttcatcccaatgccttttccctctctgctcctttcttcacatcaccttctactcacttgatctgctgcccccttcttacaaggacccttgtaattacattgagcccaaccagatactcaaagatattcttcccatctcaaagtccttactcacatcagcaagaatgcttttgccatgtaagataacatatttatagattctggggattaggatgtggccatctttgagaggccattattctgcctactatagcgttcaatacaaacttccttcccagccagtcctaaatcaatgaaaaaatatatattgttgttgggagcactgaagatccctgtaaaatatggaacatcatttttttggcagtttttatagtcaccagatttctttttaaaattttaaataatctataaagtatctttgtgtaccacatacttgttaaatgtaaattctcatatggtaatataaaggaagcctgtatatttgaaaataaatatagaaaacccttcacataggaaaataaatgaaggagaatattggagagagtttctgagtagcaatataaaactttattgtgaaaactttattgtgattccattttttttccactcattcaatcagaaataggagaaaggatcacactgaatacaataggaattgtcccttgaatataatatctagccagtcttctggaaatattatttttgttactgagctttattgagggaaagagctgttagttaagggttcaaatcctgggcaagtacctagacatcagttgtttaagtttctgatgaagaaagcaagccgctgtatgtttttaaaacttttaagaggaagtagtcacactaacataaaagaaaaatccttctgaagaggcagcaatacacgtctcctggagtgaggacagggtttcagcacctaggtgtcactgccctttaggaattttatccccatcctttcactccagttttggatattttggcataaaaggcacatagcagttcatagcttttaatgagttggagaattacattgaaattcagtactgtgataataacctccaaattaatattttccttcagataaattgcacttgaaaaaaaaaactaatcttactgcccataaagtgacgtaataaaaccacaatgccaactatagcatgcaaaattctcccagcaaatgttacagagacagtccactttctgagtgtttgctctttgtgtttagctattaaaataagggtttaatttaaaatgcatgaataagcttcttacttgattgcagacaagcaaaggaagtaaatattgtttttctttctctcttttagaaagcaaatattcaacgcttttctttcctttgtgcaattgcaaatttagtaggtgtcctgggaatgtaaaggggagttaggggcaggggaggagggtattgagcataactgttcaggtaactgatctaatgtcctgatcatctctgtgatttccctgatgtttctgctactgtgtgactttcgcttatgctgggatttataaccctgtcattcacgaataggtgtttgagaggagccattaaacaaccatcaaagcattaaacagatacacacgggggaagtaccacaagtactgccataagttgcctggagagaatcgctaagcctggcagcagacgtgatactacttggagtaggaatctggggagctgagagttgacaacaatgtccagaggactggaggtgaaagagcaggcagcttgagtgtgtgagacagatgctgctttcaccatctcccacgtgtaatattttcaacacatcagtggagcattagagttcgtggcatgcctagtgacaggaatagaaccatgaaattgtaatgtcttgccagttttaagatgtagatgaataacttcttgtcagagcaatgaagtctttcttatcctataaaaaatccacatataactaatgagactcttgggccatcatacctgctctgttcaatgtcttacactgatttggctgttcaactacctgtggcatttggaccatgaagacaggtattttccaaattgattaacgctgtactaaatttgaatacaaatgcctacatctgagttgcatcctgaatacaatgggcaaatttgacatattatataagctattcctggtgctcctacatcaatgatcagatttccatgattcctttcatacagaaaacataaaaattagctcatgtcacacattgtggagggagactagggatggcaagatgtcagggaactgccattttgactgattgtcctcctggcaatttattatgataatagattgctttttattatatcactgcatttgactgtgatgatatttaactactgaagattaaagacatgtcatgatgccaaaggactttatgaatggactagtacattttttccacacttaaaattaataaaacagacaatcataaaaaattctggaaaaactcagtcactccactaaagaatctacaatttttgtctttcagcatttccttcagttgttgagccaatacatgtttattgtttactttttatatgatagcactaggctaggcaccactaggccaaggcacacttgaccataaactatgaccccaatctgaaagattttacagtcaagtttatcattcataaggcaagaggaaagaatgcaaaataatatataccatttctaatttgtatgctatagaaaataagtgaagtgatgcttacagaaaagagaagcagatcaattatggatagaatgatgtagaacatcattgcagtcaactggtggatggatagaattctcaagaaaagagaagagaagtcatcttacatagggaagtcaatgcgtggagaaaagaatatgcttatgaggggaacagataagaccatttcttaagtttaagggttactgtgctccagacattgtgctacatgatttatatgtcttttcttatttaaccttctcagcaattctgtaaagttatgtaaagagttatggtccccattttacagatgagaaaacaaaaccttaaagaggttacgtaaagtcatacagcttggaagaggaataacttggtctgaagcctggtgacatgactgtgtgtcggctacagtgcaaatagtggctacatgcaggttcagtctaggatggtggctgtgggaacccagaggtagacccaaatcgcagatgctgttctcacgaaaaaatggtcaggactctgtgggtatggagaaatacatgaagactgtcaaagattctaagggttttactccagaagttgggtgctgactttaagacccactcaaaaagagtggggagagtctgttctctgagatcctgcactctctggagttatcacagaatttcaagagcaaaattatctgctgcctagagagcaatattcagtcatccaaacctttggggggaaaaaaagactaagattgtttggtccctaggctgcttacctaattcttctatcaaataactaggtcaagtaggaggatgcttgggtgggattgaggaaaaaggcctttcctgagcctaaagggatttaaaaataaagggaaaagaggttaggaaagactgtgctggagcctagggagcaagagctttgtctaggtaccctaattcagtgaaaaaaatggagcaattagctgaattggagcaattcaatccccaagcgtcacttttgtcttgattttcaataagtgtacttaccagacaaatgtctactgagtacctcctatggaaagtggcttaagagatacaaatatcaattagatacagattccatcctcaaagagtttattgatatttatgggaccacatacccataattaaccctgtaactggggtgaacatgattaatagcttgagctaggcagattaaattatttcagggctcagaagagaaagacttctgtaagaagggacaagggtaggtgaaaggctaagaacagaaggtattttggaggtggtttttgaaatgtatgtgataggctttggacatttagggatggcagaagaaaagaaaccaattttaggcaaaaggaatagcatgaattaaaagattaaaaggtgggaaaacatgaaatatgaatagggaacaaacttgagtacttgggtttgcctagagagcaaagaatacatgagtatttcagaaaatacaggataattgattcaattttgcactatattctgcatatcgtttcatttgtagcagcttatgctgacaccatcgctatagtggtgcccataatgttaaagtcaactcccctgacctaagtgttgctcattgcttctgccagtcaggtcaggtgacacccggccctctttgcaaattcacagaggtgatttggaaaaatgcagacactccatcagctaaaaatccatcgaccgcatatttccccagctattggacatagtcaacgttaatagtccatgtaaatagtcagtgttagtaaaggcagtgtgagactccctttcccacctccctgttagtcttctacatcccttcatggattcagtcttttcttacctgtgggcacaatttagcttccttggatgtgctagaaaaaaaaaaataactatttgatatgagcttatggtaaatttctagaaagtgataaaattgatgtctatattcagaggccctacaaagaaactgttttctcactgttgagttaccgacaaaaaaacctgacactgaaatgctgcagtttcttagtaaaccaggcagctggagggctatgaaccacactgaaaagagtttgccttttctaaattagtgttttgctcaaggggaggagcaggaactaattgtagtaaatattgcctcccagcatttaattctttataagtaaatttacttttggtttaataaacacattatttcaccttttatattcaaatgttgtatagccaaaatatataatattatggttttcttcttaaaggtattaacagaggagtcaacagacagtacagggatctgagtcagtcaagtatgagtatgatatagagaacttcctcagaagagcatttgtcagtgtcacacccactgtacattaaacatagtaaagtttataatataatcttgagtctcatttattgtatctagttataacggatcagctcccttttcatttcttctttaatttcactgtggtaacatgcttgagtgaattcagacatggtacatttaaccaatttggcagtatgccttaggctttttaaacaaacaaagatttgacgggctgtctctaaactcgagcccctcaggtaattcttgcagctgtaaatactacccctaaggtgatttttcactgtactgttgggacccaggatgctataagaaagtgaaacccacacacttcaggaccaatattaattcctcagatttctctcctctttttaagctgaatgttgtcttccctccaacttatgatttccgcaaccctggcactgtattgaattaaattgtaggctgttttttttcactaggtgttgcatgtacttcctaaaagccatcatggttggggattaaatatcttgcaaagttaagacatagtgaatgaattactctatcgtttttctgaatgaacagacaaaaccctcctcatagattagttaactggatttttttcctggagctccttcccagagtagggtataaataagtatatttgtttataataaatacataatttatataaatcaatatttacaataaatatataatatattaaatacaaatatctttttatggctttataaattgagaatataatttaatgtctgaggtgaaattttttaatgttgaaaagatatatacttcaattattttcttcttaaatccaatctagcaaatgatgcctaacttttattatacataagtcaaaagggaaaattggcttttaatgtattttcctaccatgtttaaattgcaacactatatgctaacaaaataaaaatatttcaaagcaagtgtcttgagaggttgcatgtaggccaaaaacaataggaagtatattccacaatgaattaaagacgtgtgaacttaaggttgcttgtcccctgggtaagagatttgtcttgttttgtattagcttggcacctaccacaaggtagatggatcataaagtttgattattactatgaactttttttataacccaaacttatgacccatgaacaccacctcatctctcatctaacagccctttaccttttttgaagtgttaccaaggtaatacatactacaaagcatgcacaacaaaagagatgggaattacaacaggaatatttcatgggcatccaaattgtaagcaatttccataatcagggatttggtagacatctacataaaccttgactcaagacaaaaaccttgtcagaaggatattattttctaaagaaatcaggttaaattacaggataattgcagttatctttacgcatattatttgtggaggaaaacaaaccttgaaatgtgcttttatatagactttatagtggctcactggtattgcatagaattatgaaggcaaaaataagtcaaccaacaaccggatatgccaaaagcttagatgctatcagttgtggacagatatcaatgagtcctctagccaactattattaaataattgcctttccctaatatcattaatggccgaagatacagatttacacaaaataacaaatttcatctttcctataatgcctttgatctttgcaatggcctatagtattgatgggagttggttttcctaatgagggaattgacacacagaaaaaggtaaggatttactaaagatcatagcagcattttgaagttgctcttcttcgcttttgggaaatgaatcctgtctatatgaatatatcctttgaaatgcagagttctctagaatactaattgcatgattagtcaatgctcctgtgagatgatggtgaaagtcctctcttaagagcttcgtgatcagatttgtacatttgtatgctaggtttctctgacctgactttgtttactgaattctgaaattacctcttttgtggttttttttttttttcctgcttctatgagttcactttctatctccatagatatggatttcttcatcacattcctctttaatgtggttattagatatagagtgcagaagatttcatagttgagatagcgagatggaaccaagcacactgttttgaggtttgcaccctcccagtttatctcttcatatggctgcctgggatgggatcatgccttgccatctttaggagcaaggcctttcagctgctgtcagattcatttaaataacccacagtgagtgatgcccgactatgtggtgctgtttgatgtgcagaaaatgccagggtgcatatggagagtaaagccctgataccttgtttatctcattttggcctcgccgaatgtgctgcctctccccagcattccatctcaatttactgaggaactgtgagctcaaggaacttatccaaagtcacacatgagtggcttaccagaattcataccccagaactgtcatggttcctaaatcctttattatgagcattataccataccatctccaggtctcagtattaacatcatgtaaatttattctccagcatgattcattaaaatgaaaatgggccattctctctgattctccaagcacttcagaagaagcgttacatcctgaatacagatttcatttctgtgaaggagacgagaaaagaagctaaacctttgcttgtattggaggctggttcaatttttaagggcttttatgacagttttcagtttaaaatatttaaagaaaagccaagcagtgttaaggttaagaacagctacaattgcatttttaacagtaggtaaaacaaggaaactaaaaagtgcctgtaattcagtggcaaaaacctaatgaatcccctctggataaaatgttaatgtaaaactaaatgaaaaagaacacaatcaacctgtgctagacacccactcacattttaaaatgctttttgtcatcataaaatacataagcatcaaatgccttttttggcggtatctcattttttgtttaacgaattaaaataatattagagcaaccacttatatgtagctcccagtataaaacaatataaaaagaaataaaactcaacatataagcatgtttgaaattatagtgaagaggtagaaaggtgaaaataaaaagtggagaaatgtaaaaatgtgattttatctttttcttctcttcagtaagagtccttccactttgggtccgttcttctttttaaaaaatatagagaatacttgcccttttttttacatggatgcttaggttaactattatgttcaacaaaaggcacttattaagcacccatatgtgccaagtagcagaattggcactatttggaaaatatcatttcctctctcaaggaagttataattttgctgtggaacagagaatacagagaagaaaatgtcaagtaagtggcacacacggtaaatattgcgggtgttttgatgagaaatgcatgttacagcaaaaaaatcagccttccaaatcaaagcagaagcacaaaagatggttacagacagcggaagagcctgactttagggttccgatggacctgtttgcaaataccatctctaccacgatgagttgtgtgatgttgaacaggacttattccccagatacaagaagggatgatactatctacccaatagagctattttgagtattaaattagaaatatacacaactaactttcccatcaatggtaacaatgattctagtggtggtagtaataagagcatttttcaaactcctggaaccagtgacttgtatagaaaaagctctgaatgaatttcaattcccttttctaagaccccttttacctgcaacaccatctaactctaattgcatgagttgaaccttaagtcaaaatagatcctgcaagtttagaattggagacagacatttcatatgtgaataaagagtaaacaaagtctggaatttgaaaatacaattagggcctttaagaaacgatgaacatactagattcagggggtaggtgttgattgtaaagtactaccacatgcgttttgaaagctgatgagctgtctaaatactacatatggtaaccgctatgtagaggatttttttctactacttgactttgaaataacttttctccatatgcatgccaaattaatatagcagagggagaagttcaattcagttcacttcatcaagtatttataattgcagaatgccagaaaaggacatttttcttgatcaacatctgcattccccttccagtaagtcccaatagacttactgtccatattgctgttttctgcataaataggaaatcttggaggtttggcctctatactctcctgaaaccacatatgacaagtagaattgttccttgatacactgagattagatgattgccccagccttcagatcacctgatggagagaactggggacagactaggaagggggcagtgatttttaacaactgggtacaaaagaacacaggcagagccacattcatcagtcattcttctactcctccctggacactacctactacaaattttgcctttctttatacctcccagttggaatcttgaaatttttttcctaagggcctgtaaatgtcacatatataaatatagggatttagcacataatattatagtattatgtgtccctaacgaaaatgttttaggtgacaagagcttcagcaacatcacagaagaacgcagaggtaatcaaaagaccatgttcagaaaaaaaaaaaaaaaatcaactctctaaaaatcttgttgatgtcgacacattccaaacgcaggaaacttaactgataaagtaaaatgttctatttagcactttgacatcttttactctcttccgttttttttgtaattgaaaacatattttatggttgaaaataaactgttactcaagtgcatgaaaattaatttttaggaataacagtttggggaaatgcaccaaaataaataccaagtggagaaaagaggttccgaatctaattctcgaggaatgtcatttctctatagaatcccagtaagtaaataggcaaagcagttttaataaaagtccattccagagtaaacatagttaacaaacatacatatagaaagatgtttactccaggcatagtccaagaaacaaatacaatagccttatgatacacatgatttaaaagtttaaaaatgaaaaaaagtgacaaaatgttagcaaagttgcaataagtctccatattcatttgtttttggtagcattgaaaattggatgattcttttagaaaatcataggtgaaagatgacaagtaggtaatatttagcatgctaactctgactttctgtttaactccagtgctgtttggcgctctgtgctgataagaatcctaaagcctcgtgtggtcttagcgggaaagagcactaggctagacgagaagtgtgtgccatgggtaagggaacaatagtaagaagtaaggataaatggttttaacattccttgatttaaaaaaactccagtcctaagcaaatgtttcaaacaatataaaaaatctatttataaagaggttcatcacagaattaactgtaatggcaaaaaatgacaactttaaaaacaatggaaataggccgggcacggtggctcacgcctgtaatctcagcactttgggaggccaagacgggtggatcatgaggtcaggagatcaagaccatcctggctaacacggtgaaaccctgtctctactaaaaatacaaaaaattagcctggcatggtggcgggggcctgtagtcccagatactcaggaggctgaggcaggagaatggcatgaacccgggaggtggcgcttgcaggagccgagatcgcgccactgcactccagcctaggtgacagagcgagactccatgtcaaaaaaaaaaaaaaaaaaagggaaatcgtttaataattatggtacctcatcaatgattttcatgtatttaaaagtatgattttaaagatcatgttgaagacaatttcctccattcctccgttatatttttccatgtaatatgcccatatggtaagcaaacagaaaataataactaagttggttaaaaagcattaggagttttctgccactgagatcagttttgtatcatccctcaccctctggcattttaaaaaataatacttatgattccctgattctatggaaagaaaagcatattttagcacagttgattctgtagaaattaaatttcaggtatatgaatttaacaaattagcacgtcatcaggctgattgtttgatctttcttaaattagaattaataaggctggaaagaaattacttccagctcgtgcctctttatacggaaatttgctaatgaaacaaaacctcaaactacttaagtatgaaacaaattttcatgccctgcattttcaggcttagtattaaagtagacaagcttctttgcaaacaaatttttcagagaaatcttcaagactaaattacaaagcacactgcattttctgcagatttgtggtaaaccaataagctatgcagcaagctgctactagaaaaacaaagcgtatcactttgctttttcagtttatttatgtgtgttttggatagtccctagtattgcatccgaaaatacctgttacaagatgttcttactttcattgatcactgtcataacaaaaaattactgttcttgtaacatttctataccatctttctaaatattattgcaatgaatgctaattttaaaaaatactttattcagcaacgacaaataaaagcacaaaggatagttatcttttaagatttacctttaaatatcacacagaattacatataatgttttgcaaaatatttgatcaaaatgtttgatcaaatattttgcaaagcattatacataatgagaagcagaagatgaaaatttggaaatcaaataagcttttggatgtataaaacagtagcctaataagtacatgtatggggtttggaaaagagattactctatatagttcaagtctttattgtagtcaaacaaggaaattgtgagacatcaaactggtcatttaaatcgatatgtgtaaaatttgtgcagttgcagtgtctctggaaatatcaaattgacttactctctctacctcaacacaagcctcacaaacgtgtctctattagtccaatttcatactactataaagaactgcctgagactgggtaatttataaaggaaagatgtttaattgactcacagttcagcatggctggggaggcctcaggaaacttacaaacatagcagaaggcaaaggggaagcagccaccttcttcacaagacagcaggaaggagaagtgctcagcaaagcgggataagccccttacagaaccatcagatctcttgagaactcactcactatcaggagaatagcatgggggaaaccgcccctatgattcaattacctccacctggtctctcccttgacacgtggggattatggggattacaatttaacatgcactttgagtgggacacaaagcctaaccatatcagtgtccaagaaatgtgtgccacataagttcctaaatgactaactggagtaagcctatgtgatggtaaattattttgttataatgtggtctaattgatgtgagctaatatgccttaatttacattgatagtaaattactctattggactatgtcatcatcatttaaccatttataaaattgtatttgctctgccagcctcaattctatcaccgcatacttttggttatagaaaagaccagttctaaaaataatggtaaacttatttggattaagggaatctaatcatctttatacttatcatgtatcatggtactcaagcttacatatttttctatcttcctaggctgtatttacacaacacgatatataaataccaagcaatacacatgtttgggttatttaaaaactaataaaaaacaaggaatattttagatcttaaaaagccagtaagcaaatcaagaatttatttttagaaagctgatcaaagtttagataaagaaatgactgaggaatataaaatttggaaagtaaggaaaaatcattttaatctttatttgtacatatattggagtctaatactctaacaacaatacatagtaccacaataactcaaaaaataaagtttatttctccctcacaatgaccgtctaggcctgcagaacagatgaacagctttgatccacacgatcactcagagatccatgttttttctattatttaattctgttgggtcctctgagaaatagtcattgtaacaaatgtaattttacaaaaaaccttatttgatgagtggaagataaaacgaggaagaagcaaaattaggctacagaagccttccaactgtgctgcaggtccgaaaactatgaaaagaaagaggaaaggaggcaagattttgcacagcaaagctgagaccatcatgtaaatctggtgaagattaggtcagcccagtgtacatctgcagagcaaatattgcttattatagaagtctcatattgggcaaaaatgggctgaccctaaagccctcactgtgctcaatttttggctgtggctgcccaagaacaatgtggccttggcttgaaagctgaggtaaatcctgaaggccttaacggttgaaggtgctcagccaactgcctatcttgcaactacatggcaagctcttttcttaatgtgagatctgggatgaatgcctccaaggctgccatattatgtaataaagggagaatgggttcagggtacaccagctgttggcacaatatgcatatatatcccattagtaggaatagaatacaaagaaatattgatttaataattggttggatcctgctaaatctatctggaagagggctgtatcagagcagtgagtgtcatgtgtgctcttaagtttgagaaacatttatagttttttcctttttcagaccagaactgatatagtcgattagagagtagaatttgttgtcaaatttgtgatattttaaaatttataaacagacactacatagaatatagtttttcatttgtattgagatttagctgaaagaataagaaagagctaatcagggtcctttgcctgaattccccacaaataagctgtaatatggagaatcagcaaggataagtgatgaattttcctgattaaattaaaaatatctctgcaatgtatctctaacactcacagtaaaaattcttactctctattgctgtccagatccaactactagaattaattctgaggaaaaggaacacaagagactgggtttgaatataaatatttttgtccagatccaaggagttaattcagtgaagaaatagcttccaatccagagagataaagaataatttctactatttattgaaagtctaccatttattgacatatgtcaagatctttctatatgttgcatgtaatctcaatatccctgcaatcagtactgttaccctcatattacagatgatggaactaaggctcagagttttactgattacccaaagacatatggccagtacagacttaacctggtgttatactcagatctcagtcatccagaacccatcaatttttaattatgccattggctttctattaatgaacagtcctttggaataagcattctttccttttcttaagtgtttataattggtcagatttgaaaatttttgctttttaaaaaaagactatagtacagtttaaatgaatgtgcactgtttatggcagactctagtgcttgctagagtctgtttattttctagaattcacacacgggggtggcaaggagtcagatttagtttagaaaaaatatttaaataatgttttaagacatagaagttttgttaagtctcttataagaaatcagaacgttgtgcttatatatataaacatatacaaatatatacatacatataaaattgtatgtgtacaagtatatatgaacacatatgttcatttatatacacataaatgtagacaaacttgaaaacataaatttaaatatccatgataccttctgtatccactcagacattattatataattgacattcctcattcctggcctcattattgcttgatttaacgatcaagaagtagaagaaagacacccttggaaggttaataagccatccagaaaattagattagaatgatcaaaccttaatgattattgtttctcattataatagatcacctaaaagtttgaggaagaaaaaaaataaattggcatcattgggcaattatacttgtagttttccacagtagattttacggatgatcaccagttatgaatccttttcatatcgaaaaccagagtttttttatacattatacttccattattatagtaatcaaaggccatgtatttgatcatcatcataatggagtacttgaggcattttcttctttgctaattgacagttggtcagttaagaagtgcttttcacaaaatcttccataaccttaagggtttgaattagcttgtaataaatgcctgagaagctcctctagattcttaagtgcatttgctaaaactctcaaccgctattttccaccttctggtcaggaaatgcctttgatctgccatctagctgccttacttgcatatatctatctgtctcaagcattgtaaccctactcatcagcacagtgacacattaccatttagatatcattttctgatgaccgatttctctgaaaaagaaaatgaaatgctaacagtaggaaaagggtcaaactgaagctcggattgtcccatttggagaattgcaggaggtggtatgtagtcagaagactgagccctgagcttgatcttcactcccactttaattacacacctaagcacttcctgtgcagactttttggctcactggctgctccctgatcactcacatgccacttcaccatctgtggtgggacaccctgccccagagcctgagttccacaatatcaaaatccagtaatacaaaattgcttccttcaatttcactctccctgccacttaccaatgaggtggtgctagtagagggtgggcaagggagtgaattggagaaatgggataaatgaacttgctgcttttttaaaaggaagagtgcagtgcatggtcttaaagcatgatgatactataatatccatagtgacagggactttatttagctcagttttctctccattctgccacttacgtgtttagtaagtgttggtggagtaaatgaagacgctagagagattggtttatatcattgaattaaaaattatatctagttttacttcgattctctcatggcattctatttttaagtaaataaagatttagagaagatatttgtggtgcatgctcccaaatattaggaatttaattgatcagtctaaaacctctgttaataataggaaaggaagaaagagaataggggagacatagaaaggagaggacaataatgcatgtgagtttctcaaatataacagagcaatagatatttgagtaaagaaagcttataactataaatatatacctataaatactaagttggaaaaaaagacttttatctctgacaaaatttagtaattttattctttttcttatgtaataaatattccctaaatacctactctgtgccaagtaatgtgtggctgctaacacacagcaaaatgaaacagattatgcccacagagagaccacagaggtagttccttacacttttacttctttccttctttgcttccttctttccttctttgcttccttctttcctttcttccatctttcttttcttcctttatttgttcctcctttttctcttccttcctcaagtacagaatacaaagtccacagtatgaaaaatgaaatgcatccttagtatctcccgcaatagttgaattaatctggaaaagttagaaattgaaaatctctttttctccactgaagttagcttcttcagtgtgcttcctaatatttaaaataaatattttgcaattagggcaaaatatgttagtgacagctgcagaggctgaaggcttctatttattcagatacccatttatctccaaaatatcaaggcaatggcagattcccagcttatcattgcttctagatgtgaacacataattaaatctctatatgccttcgttttgctttaatctcattcctcaaactgctagtaatgagagacctgttgatgtcagttgggaaggtaattctttgtaggaaatttttagccaccgaaaatgaagtctgtcctattacaagtaatatgctgctcaagggtcccatgttgtctttgtttaaactcacagagcaaaatttatacatggaagaattaggcccccatgaaaagaaagcacttttgcaaggatatacatagtatgtatgttatatttatatatatatatatatatatatatatatatatataatagtactgtactctgggtataataattaatctcagtggatgagataggcatgctaatccaaactataaatataattgcaaatatagaagccagagcctcggacagaggaaccaaagatattcattatagcgacattcatccttctgtgcctagttcgagtattctaatctgtggaacctcaagccacagtaatattgatgctcgtcattaagatgtttagagaataaattagaagacagctttgtttgagctcttgggatacaatgagtatgtttttattaattaaagttttctgttgtgtttgtttatttatcaagagaaatatatacaaaaataacacacatagacacaccacacatatatgatcatagtaagatattctctccacttcatgagaagatgaaaatggcagtcatgctatctcttattttataaaatttggaagtctgaaaggctctaaaaagccctgaattgggaagattgattcatggatgctattatataatgtattcgagttatatacttgttagagcagcactacccaataacattttttgtgttaatggacatgttcacagtaaccaccagctacatgttgctgttgaccagttgaaatgtagctagtgcaactgagaagctggatttttaattttatttaattttaattaatgtaaatttaaacagctacaggtggctactagcttccgtgttggaaaatacaaacctagaacatttgatttccattttttaaaagacttgttttgttttaataatagtaatttaaaacactgcttttagacaaatattaaccaaaaagatatataaaatagtttaattatcattcaataaatatttatagaatattttatgatcacccaacaaaatggatttttgatgcttgcaataagattcctcctagaaatttagagaccaaactcactacattctccaccttctcaccaccccttttcctcaacatatgaggttttgtaatttgtaatttaaaatgttaaaactaaatataattattacaaaagtgagtcaaaccttctcagaactaatagcagcaacttaaggcaggttgatactcaggtttggataaaccacaccaagtgacatattaatttctctactggcttcttagaagaaagatttgaggtcagaaaataaaggaactataggtacccactcttttagtcatctgactatttgatttatttgatgagtgatctcagttgaccctcccaggcactgaaccatcagagagttatgctgctttgtgataagaaaccttgagagatacctaaatcttcttttaccactgggagttacatctattctggaataaagaacatttttatgtatggtgtttctatctagatagctgtagaaatattcagaaaagattcacagacttaaattcattctgacaaagatcttaaaattgtataatatttaccaagaatatattagataacaccttattttgttttatttttgtttcttaaaaggtgaaggaatggttaatgtattatacattgagaagtcaattaactttcattagcatttgtttttctgtattttcctcagagacaaaccaaaaaatgaggaatgtttctaatttgatctctggagtaatcatagatatggatattgtatcatttaacagacttactaaacaaactagtaggttttgaagtgtacatttctacgcaccaagaatgcaactggcttcttaattttcctgaagttctgaggctggtttttatttataatctaatgttgggctgctgatgatatatagtcttgagtttttaaataggagttaaatacaagtaacttgcttaaaaaaaaaaagttgaaatcattcccagctgcactaaaactgatgtgtagtatatgtttttaaaagcaggtttcacaagtgacacccttggctgttacatcctatcccacccacagattcctgtcaacatatagcagttttcactaaggagatttcattgtttatagtatactcaccttgccctgggattctgccaggtacagctgatataaaatacacactatgattaaaacacatcttccccatttaaaaatacctcacctgaatatttttttcatttatttgcacaaacccacctatatacacagaaatcactacctcaaccatctgaccctcttaagagtaaagcaaggtacatgttttatttggaaaccctttttaggcaaaggaatgtggttaacaacctttctctttgaactgcttgtcaggcagtgtgggagcagaggaggaatgagatttgtcatgaaagacagcccatgcttctgacatggaatttagcaactcaggtggagtcctcttcatttggagtacttgtgttgtgctggtggaaggtattcctatatagaggtggttttcctgaaaaaaatgaatatgatgcagtctccgtggactactatatagactaaatctcttttcctctcccttctctcccatttaaaaatgctgtcaataccagtgcttgtacatccatataatcccgtaagaatggtgcttcagatacacaaagagaaagcatttgagtatagagacaaaatcagttgctacatatcaatatttcacaaagttttaagtatttcgtttcattaacattttctttgaatcacaccacatatttttcagggaaaaaaacttctattcattttatctaatctaaaaatacgaatatgcatgaagaaatctaagcagcattgaggaaaaatgaaagcaacagtacaggatgttgtgtgggtatgaatttggtcaggaaacagaatgtgtcttgagatagaaaaaaaatgtgttgcttttttttccccttttggggataccctgaatcagccacaatctgatctttgtatcaaagtgctttaagttttttaaagtatgcatgtgaatgtagcttttaaaatacaggtgattattagaaaatatttcctgtatgttctgtgaaagtgaaattgggcctatttaaggatacaagaacttaggtatattcttgcaccttttttgatagttattatcaatattagctctatagaaaaagtaaggttaaattgttctaaatgttccaacagtttcttcctatcttctgctctgctagagagcaacacctctcaaaccttatctacttctactctcacctctcgtataaggctagcagactatatattccttgcttcatactgtattttcaaaccattttcaatgcaatccagcattactacccaataaactgcttcttatttgaagttcatgctatttgcctatgccacctttccccatactttagttataagctgctgaactccacatcactatcatttttctcagtgactcagcacgtaacttattttcatatttagtcggccctctgtattgtgggttccatatccatgaattcaaccaactaaggaataaaatatttgaaaatacgtggatggttgcgtctgtactgaacatgtacagattttttcttgccatcattccctaaatacagtataaggattatttacgtagcatttacattgtagtagtataagtagcacagagatgatttaaagtagatgagaggatgtgcataggttatatgcaattactacacaattttatattaaggaatagagcatttgtggattctggtgtccacaggagttcctggaactaatccctcgcagacactgagagatgacggtactcttttttagggtaaccaatcaggtagctgggtacttgagagctaatggtgaaattgacacgtttcaggtttctaagaaggtattaggtctgtaatatagacctcatcctacatgtaagaataagcagattgcatccgtgccacttagcctcatcttgtaaaatattcaggtaatgctaggttatgtaaagttaggcagtagtagaacatcccccaaaatttagtggcttaagaaaaccaaggatcacttttcactctcactacttgttcactgcagttggttaggcaagatgctatgtggggcagctggctctgcatattgtagtcaccagaggacctgggcagagagcagctatcttaaacattgacattacacctgtccccagtacatcagtaaatcttgtcagttctcttttcaaattacatgacacatttgacactttttactatctctctgctgcacagcctcctaatttggcctcctcccttacttattcaaagcattcgctcagtagggaaagagtgctcttcagggtctgcaacttgcaattacatgctataccctgaagtgaccccgtgtcactttccactcgacaactcattagtcagaataaataatgtgacccagtcaaccacaaggcacctaggaaatgcaaacttgccttatgcctggacatttagtacacaactttaataactaccaaagggtctatttgatctttcttctcaacattggccccatagtcctcagactcctcaacttcggtttaaccatctggacatgtggttacaccttgttattacctagaacttctatgatttaaagatctcagattctgaaatttctctctctgaccactagttcttacctctcaagccccatgctaagatggatataaaatatgtgtaaatccctggcaatgtgacaagtataattgcagcataagaaacatgccaagaggctagagatgaaggtgagatggtagggtgggggaaaatcatgaaagactttgaatacaatggtaaagactgtgaattttcatccttaaagcctttgaactaaacaggcttgtatcttaatcagacttatatttttaagaagtcattcaaaattgtttattaacctgtatttcatagttattagaaatacctcattggcttctaaactgaggcataatcttaaattatatgaacagcagtgaagccctacaaaacatgagtttcaaaaattttgtcattaattccatcagtgtgactcacagtgttatggtcagacggatcctttgacatttaaaatgcttcttggatttattattgttaccaatatgctttattcattcacaaatctaaatcatagtttatacctgaaaattttagcttatgtgtccttcaatattttgtataatgtcctaaaaacaagcattaaacaaaaataataatggtgctggttaaacctaaatcttcatagtttaggccaatagcaattttccccccaaacgtgaagacatatatatatatatatatatatatatatatatatatatatatatacacacacacacacacacacacacacatttttctaaatctagaaaaaacagggaaattgattaatttccaattatattataattaagttataaggcgtttaaaaatagaaggtccatgaaacttgatgcagctaggaatgaaagcagtttgaatttaaaaacctaaagttgaaaaaattagcctcattaagaagttctaaatagagcattgttaatttttaaaaatttatctctttgcatttatctctggataaccttggtgatctaatggcagtaaaattttctctaaaactcatgcaatttttttaaaactagatgtcttttccacaaatatttattttcactttgtagtttcagactgagctaatggtttcgtaagcagacatattgattagttcaaagtcaatttctaacctattccagctcttcagctttcttagaccattttgtggggttttttttggtttgttttcttttttttcattttgtgtaagatgggcatgtcttctttcatacctgaaatcaaataaatctgaccttcctgtccttaaatgtttgaggatacatttttcttcttgttatctattttttttgtgtgtgatgatttaaaatgaagtatgtgaaaacactttggatgggaatgaaacctaaggcgctgggacctccttaattggctgctagtggagcaaattccaagatggagcatcactacagaggtcttcaggggttctagcgggtagactataaattattgatttgaaaccagagcttgaggggcagttgtaagctggaagagggaatcacaggagtcactgactctaccacctagagccaatagcaaaagagaaattgtagagatgaaatagggtctctcaatgtgagtcgagtagggggtcaaggaaggtatgtagctggatctagcaaaagactgaagctaattacaggcactgaattccgtttttgccattctttctaatgttttggatattgtaattccagaagaaaaaaaaaaaacaggaactgggccttaagtaacaacactaggctggaaaatattacaggcaattcaaaaaaattattgctacaactaccgattttataaaatatgttgacctcttaaaattggctttttatattttttgctactcttttatttcattggtctatttataccaaataagttatatatttaaacaagcctgattttttaaatttcttctttacctcgacttagaagttagacttagatggatagtgtttcaggcttacagtgaaaactaatgcccatagtaggcaagtactaaaagaaaaggataaagcccttattttgtttttgtcttcatcaataagaaaagagagaaaatagcactttagtgctttcttttatccaaagtccagtgcactaaaacaaagaggctggagctccgggcaatttctgaagatatctaccagggacttcttatttatttcttacttgctcctttgctcctcccttgatccttttactcctcaatataagaaaccaaatttagatgtttcagggaaagactttttctataggctccataatatttttatctgtttttgttatgctgttttgtgtttcttattcctctgttcatacaaagatttctacttcagcatcattataaggtcaaaaattcacatttgagatgctcagccgtggacttccttcaaagaaccatcttacttggaataagagaatgactttccttcacctttaacactttcttaatgataacgccttagagtggcagagcaatttagaggttgcaaagcaaagtcacacatcctcctatttaatgtgctccacagcctgtgagctgagcagggcaggcatctcattttacaagtaaaagttctgagcctcaagaaagaatctgggcaacccaactctactttttttcgcattaggagaattttgtgaagatgcaagtgcatttagattaattaatgccattttcagttttaagtgtcactatcagattttcatttcagtaagtgacatgggagatatgtttaagaaaggcaggtttgttaagtatagaaatcagctagttagaaggtaactttaaaatttaggcaaggtatgataaagatctcaactactaccgtggtgacagaatgggaaaatatttaggacacaaacatggagtaagttattaacagattgtgaactccctctaccaaaacaaatttttagtaggttaaagttaactcaattggcaattaagtctttatttgattattcaaatgaaacttgctctatcacaaaatacctttaagttatcaaaaccaaatgccatttgctaaagacatacagaagtgtaagttaataaagatacatctttattcattagaggcttactaattagaagaattaagtacaaagttggcaagcaacaaattgatgtaaggaagacttagaaagacttaggtcttcctttattcacattaattttcctgcagtatttcacatctttttccttgtcacatcacctcaactgatgacctccttaaatgtaaatacaagagagacaatgaatacaactagaggagatcaacttcatcttgtcttttcagtggcaccacctctctacatatgtacccacatactctgccatccctcttcctccaggagaagacatggtcctgcctctaagaccaaccactacccctctgtctaaacccaatccctactttgctcctgtaattatcccctttccttcccatctaactttgttcctctatgctctatgattcctcttagcatacaatgatgcctcaacactactcttccataaaatctctctcttgaccctacatttttatccaagtaatgatgcattctctgttctcctcattagcaaatcttgcaaaagtattggctacatttgctgtttccacttagtaacctcccaggcttttctcaatctcctctaactgggatttgccctccagtagcccaagcgattgtttataatttaccaataaaaaagaaatttctcatctttcaggaattaaataaggaaaaaattaaaaaccatttatatgaatatgcataaaatgattcaaataaattatcctgggaataacaaagctatatttaattataataccatagttgatatgatatattttcatgaagtctggcatagtaacctgctctaaatgaattttgctatgcatgatatcaggctgtctgccttccttccttcatttcttcttttcttccttcctgacttcattaatctctttctcctttttaaaatgaacttagtatcttcagttgtaactcaggcttagatgataatagaattgtccctcaacatagtagctttgtattaatctcttaaattatttttcattaatatgcaaagataaattatatgtgatttctaaagaagctttgtcaagctctagcaaactagcttaattatgaaaaattaaatattctgtaatgatctcttcttttgaagtctttaatatgaaattacatttgtttaatcataagcttggttcttgggcttttcaagtggattttagaaccgtaaaccgttatgtttaagtgtaatttcaggcttcctttagtttttggcattaaaatcaatttaaaattaaaaattatcagtggtgatagattttttaatcaaaaagaaacaaagataatggatttcctccctaaaatctgaacacgttactgcactatgacactgatacatatgcagtattaatttgttttagttttatagataacaaaccaaaatgctacttcttgttttcccattttaataatacgatgtaacagtataactattattcatatggctcatatatcataatctatgaaaaaaaaggaaagtgttttcttgttcttatttttctttaaagtcatattggggtttctagggaaaatttagaaaatgttaaagaaaatatgactacagctcaaaaacaacagcttagaattgtctgggcctctaggaactgtcaacagcttccatcatttaaatacaacttactcacatgtgggagaagcatatggagggaaaactcacacaagatgcaaaataggcaagttgtacaaattaaagaacagaatggagagtttttatttaaaattttctttttatttttctaagtcaaatatgtcctttatttgagcgtaaactcacaattcagattttttgtgataatgagacaataatttttataatttattcaaaaagaaaaattgttcataactcgatagtcattttagctacaacagatatattaaatgctatcactcatcatttatttatgtaaataaagtaaaaaaagataagcctatcaagaactattttgttacctatttaagaaaaaaacacagaccactagattgatattgactaaaatagcagaaatgtgcattctaaagtttgagataaccagattaatatctgcataaaatgtgtgtaaaagctcttttctcagcctcgtaataatttaaatgagtgtagaaccagtatttttgtgtcatattttaaatctagaagtctcattatttttgttaacataacctgttagtttcagggactgcctgctttatttcacacttgatgtatgtaaatgcttctatttatgcacatttatactgcatttaatgttatgctatgcttaatttaaatgggacgtcttacatgtcagtaggagagaagtactagagctacatggaagataaaatttgaaccatgcataaagtaggaagagtagcgttacattgggagaaagccaaaatataatagaagaaacacaccttaactattatcaaatctaagctgacaaagaaagaaaatattagaaagtttaaaggcagatttggagaaaattaaaaggagatcttggtttgtgtaggtaagtaaagcaaccaaaatctgaactgtggaaagtgatgtaaaaatatttatttccttagaatttatcaagaacattgatccatattttattagtcagctttcattaggtaaagctaaaattacagatgacctcaaaatcccagaggcttacagaatcaatggcatattccttgctttgataactaaagtcaactgtggctgtgctctatgtatcttttccttctggaactggttgaaggaacagcccatattttggaatgtgtcttttttgtacagaaggaaaaagcaagaaagaagaaattcacatgatagctttttaatagcttctattaagaactctctcaattccactcacatttcaatggcaaaagcatgtcagaaaactaatgatgatatcagggaactgcaagtcatgcagctatggcaagaaacatataatccttttatcagaaagggaggaaagataatggggggaaatgatacaatctactgtgcatcatatgccaaaagtgtttttcatggagaatgtggtactatagataagtcttgaaaagttaaggcaaatacagaacagacgtcaaatcatttagtagcgattggcaggggtcttcattagtatagaaaactttagctttttgcctttgaaattaacacaaaagagtagaatggctgtataaagtaaaaataatgttttaaaaggacatgagttttatcacataggtagaaataaaatacatgacaataagaatgcaaagactggaatatgataattagaaatatattgtcataaagttagtaaatttttcatgaagtaatagaataatttaaagatacatattgtaatccttaaagcaaccaccatcataataacaaagaaacactacttccccaccaaaaatttattggagataaggtaaaacatatacctaagaatactttattacacacaaaaaagaattggaaacagagaaacaaaagattggtcaaatatgaatcaaataccaagttggtgagcttaaaactaaacatgtcaataattgaagtaaaaggactaaacacgctgattaaatccagactagatttttttttataagttagactaaattgtatgtcgtttaaaagaaacacattttaaacttaaggaacaaagggattggaagtaaaataatggaaacatcaagcaaaaaattaagctggtgaggcaatatgaatatcaaaataaagtagatttcaagctgaatagtgctagcagagattttaatggggcatttcataatgataaaagaatcacttattcaagaagacataagactactgaaagtttatacccccaatacaaagctcccaagtatgagacaaaaactgacaaaacaaaagagaactagacgcaaatttactgtcaccaatatagattttaacactattttctcagtaatagataaaacaattaaataaaaatcagtacagttatggatgatttgaacaacactaaccatcaatgtaagctaattgacattaatagaaaatcattccacactagagcaagctacaacttctaaggtgcacatgaaatactcaaaaagatagacatatcctgggccataaaagaagttacaatacatttcaaagtacctaaattaaacaaagtatttaaataatacaatgatgataaattaaactattaaatttaatgaagatgaataaaaataatatacatttgaaaaccccccaaagatttggaagttaaaaacacactgctaaataattcatgagtctaagaaatctcaaaggatattccaatatatattttgaacagaaatacatgaaaacacaacatatcaatatttgtggtatgcaactaaagcaatctttagaaggcaatttatacattttaatacctatatgagaaaacaaggcataaagtcaagcatttctacttccattttaagaaactagaaaaataataaattaagtcctaagtatgtagcacaaggatataataaaaagaacagaaatcaataaaataaaaaaagtgaaatagccttgtataaagaaatcaaatttgtaattgaatagcaacaacaacaacaaaaaaaaaaaacactcccggactagatagtttcactagtgagttataacttatgaataaaaaataatactactctgacacaaactctcataaaatagcagacgtgggaacaattttcagcccatttcatgaagggcaggcatggaaaatacaagaaaagaaaattacagccagcatatctcaagaaaatagatacaaaaatgctctacaaaatattagcaaatgaaatccagcaatatattaaaaagttaatataccaagatcaagtttgacttttcccaggaatgcaaggttagcactgtcaacaaaatagaccgagaaaaatattgcaacacatatatctgacaacagatttgtacccaaaagatattaaacattcctgcaggtggagaatttaaaaaccaccaccaacaataatttttgccttaagattcagtaatcctgctgctagttatttattcaagagaaatcaaaacatatgtgtacacaaagtcttttacaaggatttgtacagcagctttattcataaatacccaattataattttcagtcagtaactgaaaacaacccagatatccttcaacaggagaatgaataaataacctgcagtgtatcattcaatggaatactaagcaataaaaagatataaactattgatacatgcaactacctgaattaatttcaaaagctatcattttgagtgaaagaaacttgacacaaaaattacatattgaattattccactgatgtgatgttctagaatagttaaaactaatctgtggtgacagacatctgcccatatatagacagggtagtggtagggcaatgcctgggaagggtaaccagggaactttctgggatgatagagttgttctatgtgtcttgatatgcactcctcaacactaattaaaggctactgagttagtccatttgcattgctctaaaggaatacctaaggctggataatttataaggaaaaaaagtttattctgactcatggttctccaggctgtatgagaagcatggtgccggcatctgcttccagtaaggcctcagggagctttttactcatggcagaatgcatagtggcagcaggtgtgtcatgtggcgagacggggagcaagagagagaacgaagaggttccagactcttaaacaaacccagactcttaaacaagcagatctcatgtgaactaactgagtgagaactccctcatcaccaagggtatggccctaagccattcataagggatccacccccatgatgcaaacacttcctaccaacccatacctccaacattgaggattacacctcaacatgagattcgtagaggacaaacatccaaaccatatcaggtacccttaagatctgtgcatggtcatccctcagtctcctcaggggattgggtccaggacccgccctccccacagtataccaaaatctgtggatgctcaagtccctgatgatataaagtgctgtatcctatgcacatcctcacatataatttaaatcatctctagattacttgtaatacttaatacaacataaatgctgtgtaaaaatgtgttatactctatttttatttttttattattttttatttctgcattattattttgtactttttttctgaatattttgattcaagattggctgaatttgtgaatggggaaccagcagatattgatggatgacttcatttcactgaatgtcaattttaattgcatttttatcagagtgaattacaatgcttacccatgtgtttgaacattatagttcactgttttcagaaatggtataacaggttaagaatattataagagtcacaggaagcatgatagtgagaactgggttcagcaggcacatcatcatgtaggaccagcaagaagaacagggtggtgatggaattcaaccttcagaagaaattaccagggcagagagatctgagagagaagtaactcaatcatttcttataatccctccgattccaaacctccctaaaatgattaaatacattttaatggcagggcagaatattagggataatgtgctttcagtagctccatttccctcacccctcaaatttccctcaatcgcttgccaaaacctaagtttctataaaataatgggaaataattatcttactttgcaactcaaaataaaagagcttacaatataaatgcatggttaagataatactttaagataaatgaattttattcctaatcagtgtatgaatgcaaataagcactgatctttcctgttactggtaatgtagaaagaagagaaagaagcaacagtccaatttagcacacatttactgagagtgtaacatgtactaaatcagtggttttcaagcttttgtgactgtgacctttactaagaattgcaatttatattgcagccctgcatgtacgtacatatgtataactaaagctgtgttataaaataaaacatgtacttgctaaataagatggagtctggtacttactagactagtatagtctgtttcatgtttacagaaatgcaagtcatgatgcattaatttcaccacccgctaaaaggttgtgaactgtggtttgaaaaacacagtgctattctttctactcaaaatgtggtctgtggaccaacagcagcagcatctggggacttgtaagaaatgcagaacctgagaccatacctcgcacctaatgaatcagaatctgcattttaactaaacctctaggtgcttcctgtgcactttaaagcatcagaagccctgtgctagacgatgcctgaggaggatgctctggacagatgaagtcttcttggtattgcttaaggcagagactcttcctcggagatagtctgtattcagaataggcatattgaagccccaaactaagtccaattcagtatctccaaggatatctcagggcatttttattaaaaaaaaaaaaaatatgatccacgaaagcctctgaatcagaccctatttaagaaccactggtataaaaagttaaatgaaagttgtgcaccgattaagtcatttgtttgtttactgttatacaaaggtgcaaaccaatgcttccagtaatatggaaatactttattttatatttctttgtgggtgacttcatagaaaggcactttattcacacaatacttattgatgggggtattcctactgcttcttttgaatttacttctccttatcagagaatttccaaacatctccattttaccaataattgcccttttatagaaatgtaatatgacttctggtagaaatattattattagtcctgctgagatagcaaaatttatccctggatgacctccagtcaatcccttaccaaagatctcaactgctgaagaaaatggggctgtctctaagtggccatcactgttcattaaggtccttgccattgtgttcttatctttcctgagtaatgggaagctttagtctggaagttgctaatcttgctaacactaaaaggctttctcccattagcagcttctgtgttgcattaataatcagaaagtaataaagagaccgacctcagctgttcggtctcccctgagatgaggccccagcttccctcttatccccatggtccactctaatggtcttgcctatattaaagtaatagagtgaataataagataagtgctgtctattttatcagagtctaaaattccttcttctttttggggaggacacctttttttttttttaagacatccaaattgaaaactataccatcaatacttttgcaattgaaattgacctgtttaattcatattgttttaaaaatgtaagcgttgactatcaagcacaggaaaaaaatgttttagaaaaaataaatccctccacctttcttggaagagttataaaacagataactctcctagggatgtcttcttgtccttttttgagtaaatcaaattactcatctgaacagcagtaaactaaagaaaactaaagatctttgattttataagtatgaaaaacttgtcaataaacaaaaaagaaatgaagagaaaataacatattaaaactaaataagtaagattggatttgacaggttcaaggtgcatgttaataagttgtctttgttgtttaaaatgttcataaagacaggaactaatgctgggattaattgcttatgttctttttctgttgaaaatgttcttttgcagaagtgcacttcttaaaggttcccttgatttaaacatctgtttttaaatgtatatgatctgtgtatggaattatattatctatgcggtagttagttgattgtaatttttcattttaaaataaaactactttttctttcaactatatatttttaactgggaaaacaggtaattcaccttgaaagtgttgctcattccttgtactcaaatactagaaattttttctcaatttacactgttgtatcctgattttgaaagactaactttataattaggtgatatattgcctatttttgcacttgtaatttagaggaaaaaaggaccaatatcaatcatcattatcagtgactaaacagtgactcaatgtatttttttaaaataaaatatatgttcataaccctctaacaatgaatcactgtgattagctctatgcaatacttatgtaagattcagtaaatgacagtaaaaaacaactaaaaactattttctaaaaacttataatcaacatactttttcttataagtacttaacagtttgaggggaaaaatgggggcattatctaataaatcagggatgctcatctaaatttttaaaaattatacatgaaaactttctttgaacgaaaaagtccataatctggaaataagaaaatgctaaatatgtttcagtaaaatagacagtagatctctccctcagagaggtgaaaatttaactcccttttaactaaataactctttcatatggtctattaggcaaataattttgatgaatccaataaactcacatgctttttgttttatttagcatgcaaaatgcaaacgtgttcaccacataccaatgggaaacatattattgttagagttgtctttaaattggaggaaaaaaaagagttgcttttgacattcttatgaagcttcaatagcagacaggtccattgggaaagtagcagctttaattaaagaattgtcctggagttgtagatataatgcacaattacctgaattccttttactgtttttctgtcctacagtccatgaaggctctggagaaactagtcaaaaggagacatccacctgtgatatttgccagtttggtgcagaatgtgacgaagatgccgaggatgtctggtaatatgctgtttttattcttttagacaaaataatgacagtgattaatttctttttaacaccatcaaccattctgcaacagaagacattgtctgcatttttattttcttattcagttcccaagtgaaaaaaaaaatgagggcaaggaatttctggaactggattaagaggtgggccagccaagcagctatccatggcattacttgataaggcacactaaaatatcattgaagccccccaaaactgtcaatgttaggatatagagggaaaaaaaagtcttatttactagaatatctttgaaaaagtatcatcagagccaggtgtgatggctcaggcctgtactcccagcaggcctgtactcccagcactttgggaggccaaggcaggaggatcgcttgaggccagatgtttgagatcagcctgggcacaaagtgagacccacatctccataaaaaaaaataataataattagctgggtatggtcacactagcctgtagtcccaggtactcaggaggctgaggagggaggaacacttgagcacaggaggttaaggctacagtgatctgtgatcatgccattgcattccagcctgggccacagagtgagactttatctcaagatttttaaaaggcatcatcaggcagcaatagatgatcagacttagtctgtttgggtttctataacaaaataccataaactgggtagcttataaacaaaagaaatttattcctcaccattatgaaggctgagaagtccaagatcaaggcagatttagtgtctgataagagctcactttctcttaaaatagccttcttcttactgaagcttcacatggcaaaaagggcaagggaggtctgtggagcctgttttataagggcactaatcccattcatgaaggcttcacccccataacctaatcgcctcccaaaggtcctacctcccaatactatcatcttgggggttaggatttcaccatatgaatctggggagggggacagcaacattcagatcataccagttgctaatctgacttctaagatgatggagtaactactcttttaaagatatgttcatcagataatgaataatacttattattttgaatgggtgccaacattttagctttctactgtattcgtcccaccttaagcacattgaaaagtgaataactcaaacttctgagggagttctttgtgtcatgataatgaaaagcagcagcctttttttattcctctcctattctctcttctgctcctcccctcctcctcttcctcttcttcctcttccacttcctcttcttctcctcctcctcctttccctccctgtctttccccttctcctcttcttttccttctcctttgtcttcatcttcttcctattattattattgctattatttctctctttttcttttttacatatacctcacccctttcaggaaaacatctggctgctctttattttctgcagtatgtagactgtgcttgcctagagcagttaaccatcattttgatcaaacttttgtgagtagaggggaaaattcatctaaggaaaatgaagaaaaaaaattaagacaagattatgtggcagtagtaaaacagtctgcacttaaaatattttttaagtgaagattctatctgagcaaatggtggttcttagggtaaactacgtacttacaagtaaacactgcctttgaatagccaagtgaaataaacatctattactaaaatcagacagcagtagagttttcatgcctgtcaaacacttctagccaatgggcagctaggagccgagtgagagagtctatgcactggtttgaccatcttgaggtaaacaaatgtatgttttctgttttttattgagacagagtctcgcttctttttttttttttttttttttttttgagatggagtctcactctgtcgcccaggctagagtgcagtggcacgatctcaactcactgcaacctccgcctcccgggttcaagagattcttctgtctcagcctcctgagtagctgggattacaggtgcgcaccaccatgcccggctaatttttgtatttttagtagagatggggtttcatcatattggccaggctggtctcaaactcctcacctcaggtgatttgcccgcctcggcctcccaaagtgctggaattacaggtgtgagctaccacgcccagccaacaaatgtatggtttttaaaaaacatcctagggaccttaatggctgatgaatttgtggttcccaaaactgagagattgccagaagtactttgagaatttttttaaacataccagttatttagttctgccccaaaattaatgaatcagaatttcagagaagtgggactcaaaattttacttttctacaagacccccaggggattatggaaatactactctaaaataaatgactaattcaaagactctttctccttcctaaatgctttagggctcttctgtagtcataagatcaagacacacaaataggaaatgtatccttaaaatatttcgtttctaacgtttattggtgactgcatctgtatttcagcatcattttttcaagctgttttcttgtaaattgtttcactttttaaaaaatgtacatgagtctcttttttttaagaattttaattttcctagttccttatctttttaatgattattctttaagtggtatagctccattctccaagacatttaagacatgagcttttaagagcagctgaaaattattggttgtttactatgggttttatccatttgtatactgtttttttttctcagctatcttcaaaatagccataggaggtagattccattattattttactctaaaaagagaaaactgagttttaaagtgttaaagtggcaggaccaagatgaagatacgaggtgaaagtaactaaaggttgttagcataacaattcaaccaaagatgcaattgaaacaatatgtctttgctgtcatgtctagacaatgagatggccagattgcaggcagcatatttgcagtgactctccaaggcctgcaaggttagagctggtctaggtagatgtttgcagctggaagtgggaaaacatccaggcaagcagggggttaatcctggtattcttgcaaaagttcagatccatggtatgaaggcagtatgaaaagatatgggcaaggatagtggcaccagaaaggcttagcaattgtctacagggcccagccatggcaactgtacttcagaaaataaattcagttacaaatgagacaaggagaaggacaaaggagaaccttagtcatggagaaattggtgtcaatcagaaaaactcgtcaagaactgaaacaggaaagcctggatagatattgcaactggtatacaaagccaagccttggttacaagttgctgggagaagcatagcctacatctgagaaataaattacaagatcagaatgaaaccagcagcaaagctgagtgctaaatcagttagctcttggctatgatatcttgtatgcccccagcatagggacaagattagctccaagatgcagaataagcctgaacctccagatgggggctaagtggccacggctgtgaagattagagggctgtaggggcagggagccaagaagatcattagacttccaagacaagaacaaaagttattagtgtttaaataaaatgtatttaaaatgttgaatgtaagcaataaggaattgtgctgaaatgacaagtgcattgattttcatttacataccttgtatgttaacgtacctttgtatgttaacatattgtatttagtcatggccatgaagggcagattggaaacagctgaaggacacaggaataaagcaatgagtgaaattaaataggcatagaatgaaagaggctgtaaagtaagataggaagcaatagcggagtgatctgactatagtactaggcaacagaaccttcactaaatcaagggagcgttgatacgctattgattttggatgacaccacggccaggttctctcaaacataaaatactacatatgataagtggcaacaaagagtacaacttattgttttattttgcctttaacactaactaaactataattttatgtgtacagatttcctcaatcctgcattatgaaataataacaagatgtgaataactgctgacgtgaaataatgttcttactatatccacaatactgaaactaaggtgaaaaattaattcctgatctttctttaaccctggcctaataagttaatattttgcattttcccactgggttaaatctagttattcaaacattcttaagtactttcaagatgaagataaatctttattagaataaaaaagtcagtacacagttagctgatcatgttttcatagttagatgagtttttgagttcagaagaaagtcacactggagatgggaataaaaaaattaataaataggggaaagagaaggagaataaaagaagaagagaaaaaataataattagatggcattgacaaactatgatactaatgacataacattttaatgcttttattttgagaaaacagatggcttgtaatctaatctaagaccgtagtttatgttctatgatttcatttcaaggtttttctcttgcattttccttacatggagaacatcaaggctgtaaaaaatcagaaaattttaggttctctcaataggaaaggaagaccattgctacaaaatactttttcagttatagatattaacttaaatgtaggaaaggattaagcttccaaaagagggttaaaattcaacaggacaagttattcacacgccagtacatccattctcataatagaggtatctttcattaaggatggacttcgaaagtaactgaaacacctgtgtgaagggatgtgtgtgcctgtttatggggaaggggttaagagaagaagaaagggattaaaatatcatttctctttatatccagactgaaaacagtcaaaactaatacatttatacataaaagagattctcaaatacaccctgccaaatataatttataaagaagaagaatggcttataaataagtcaaatataataaaattgactcattgcaaagtaataaagctccatctgatagcattgggaataccaacttatgatttcagcaaatatttctgatttcactttagaaacagccttatattcccttaattatcttacctgataaattatctcagtaagtccaaagtaggtcagtggaaactcttttctctgggaactattccttagaagtaattagcctggaactttctgttggttctgtcagtcagaagtagttcagagcccgggggttgatacttgatttaatatacatatacatacaaaagcactgatagctgggtctgaccataggaatggctgggtatgaaattggctgcatgcctaatatttccaggaacagagcacaggtgcacaggtttaagagcagatgcagccagatgacaaatgacataaagggacaacttaaattattaggtatatttgctttatatgtattcttcatagctctttatccctgttttaactttgcttttgtagtattctctacatgccactcaggctccattagcgatatcatattggcataaatgctattaactccttagtagtcattttgtctttgaaagcattaataatattttccagttttagtgtataacatccttagtgattgagtgcaatggtaagaaaggaaagaagcaaagttgttgcaaaaaaatgagttccaaagaggaatgaatgaatgtttattattttctctatttcattgatgtttcataactgaaacagggtgtgggatctggcatttcttttctgggtgtctcttacaaagacagtttagtttgaagtctttaacatcttgctcctttgatctgagaaagctccctgtcattaggaagattgtgtgttattggcaacctgcccacatttaatgcattttggattgtggaggctcatgaatatttgaagtggggcaatggccatggatgatccttggcactagatttcatcataggtataagtaaattagacattaggtcttgctgactttagtacctttggtttgtgagtttgatagggaaaattaagacacctctgaggaaaatacagaaagtggttttatttaaaaccactcctggttgacaattgaacaaaaagattgtatttaaaatggaaactgcaatctttgtattgtttttctactaagtaaaaaggtcagacttggatatggtacatttaaagaggatgctgattagtcacaaaattttagccatctaagagttcattcagtttctccctagggtgtttcccttttattaatttcctttgctttctggccccagaagtgtaactggtaaccaattttaggtgtggtttctaatataagtttactcatggagacaatgaaaaaaaaaaaaaacccagaaaaaagataatagatctgctctagaaaatccaaggttttttttgaatgtgtgcatggctttttgagaaaacattttagtttcaagattcctggagttgaggtatgacctccctccatttacctcttatctccaccttgaagacagtagctgtcacctctgaaagctgcagtagcgttttctgtttgtgtcaatgagtgggaactgaagagtagatacctctcattcctttaatgattccatttgcccaaaaaatgtttcggggtggggagtgcatatacagctcctgacttagggaagcacatatctttccactcagaatttcaaggggaaaatgttgatagtttttagcaaaggtgtgtccaaatctgaaagttggggtttgctttcattatttctttcttttctgtatttcttcacctatcttgatcaagaaaataaacagcttatatttttctaaatttcacacgatgtaataaaatttagaagtaaaagactaggaattctgacatggtctgtacgatggtctatacagggcattaaacaatgcccagggtcaacaaatgccatatttgcaatccaaacttctctctgcagtagctgccggtaatccaacctgcaaactgaagttaaaagcttcaaatgttactcaggaagacaaatgaataacaatgacacttctaatatgcaatagtcaaataataacaaccaccaacaacaactaaccacccctccagaaaaaggagggttatgaaagtaaaaaataaaaaaaattgaaaaataaaaataaacaatagtctttaaaaccttgagtcttctgtgatgctagcctaccttttttatttaaaaaaatgggttttcacataaattctagagaatcttttaaattcttctctgtatccatacctcaactgtactagctatcacagtgattaatgaaacttaattaggttatgacagctacaaacccagatctggtgtagaataccaagaaatatggggataaagaattctgaacttcaatgtgttttatttgtttttacaatatttattaggccatgcagtttaaatcatgtaatttctattttatatcaaaatcataaaatactgcatggcaacagaacaaaggaaacaaaactcctaagtacagattgtatttctaccactaacttaacagttttcattacttgtttctctttttacttgctttttttgtttgtttgtttgagatggagtctcaccctgtggcccaggctggagtgcagtggcgctatctcagctcactgcaagctccgccttccaggttcacaccattcccctgcctcagcctcccgggtagctgggactacaggcggtcgccaccacgcccggctaattttttgtatttttagtagagatggggtttcatcgtgttagccaggatggtctcaatctcctgaccttgtgatcctcccgcctcaacctcccaaagtgctgggattacaggtataagccatcgcacctggcctttacttgctttttaaatctttgcttgcttttgaaatcttgttgcaggccacaccctgttaatggtaggttgcctaacttttggtgctcactcattaaactcactctctatttcttcttgagttttcatgtctcagtttctagcatattctgagtcagcgattcctgtctccacactcagggaatacctgctccatgttccgatgtcccagtgtaacatcccagtctcaaagataataataggaatctcattgtagttatcaaagtgtgacaaacctttccaaagcgtgtcagacaccatcctaaatgtctagatttatagagccatttaatcctcaccacagtcttatgaatgtaatacaccagtaattctcatgttacaaaacagaaaactgaggcacagacaggttaatcaaacttcccaaacccaaacagcaagtgagagagccacaatttgtgccagccaggcagactccatgctcttaactaccactcagggtcttctcttataaattatgtgtgtatctaagtgtatattgtgagtatgcacacacacacacacacacacacacacatagaccaaatgtatctatcttatatattcaggatagaattttacatgttttaatgggaaaacaaagactttaagtggcagtttgggatgaaattcaccactaacacacctacattgtgtatgatgcccttgaagttctttttcactcagtatataaaatatatttctttgtagtccccttcaagactgtgtagttttcatttgtttgtttttcacagaggtattgaattattcttatcatggttatgcatgcatccaatcagatgagaatgttactagacttaaggttgcatagaagagacataccttcaccaaaacctgaggtttttttagctgcttcaattcaatttgcctgttttgcagtggcagtggcaaccctgactgtgagccaaagcttattacaaatgtctatttctgctgtaagaatagaaattcctggagatgagaaatagaaaaagagggaagagtcaccaaattaaataaaaataaatatgacagtggattttaatctgtatcttagtagattaaatgccctgctgtatcttttaatttagcacttaaaatatgatgtgaagcctcttatgttccaatataacatatatttttgatggttatattaaaatgggttttacattttttctaaatataaatacacacattccatcatagtgatttaaaaaaaaatagaaatacaaaaactttaggaaaatgtcatccctctctaagataaccattgtgaaatttggagatatattttctgtgtgtgtgtgtgtgtgtgtgtgtgtgtgtgtgtgtgtgtgttttatgagaatctaataatattttacatattaacaaaaccacttatcttgaaaatttttagttaatcttgagggtgagttatttggtgattgttaggaatgccaaaccaatttaagaataatgtatttatactggaatgcaatttctgtgtcccaagctctgattattctttctaaattttcagcacttctaaaaaaaaaaaattcgtttgagcgtactgtcctaacatttgtgatctaaaaaattatcaaagcctatatcccctctaagcctgtgttaaacatttttcttgtttaactccaagagattagacagtatgttaactgaaaacatttccactgtctgtatccagagtgttcataataaatagctttctgaggcataagcattgttagatgagaaactgtcctcccaaaggtgtattaaatcgggtagaaactgttgctggtcttctgtggtttacttccaaatagtaatatattgtatgtgttgactcatctaaactacaaatcagtgaaccatcctcagcagccaacatcagtctgttccagacacatttccctacaaacagggcatataatatctaataaatgattgaacaaattgtaaaattatatgcaacacccaatcaaaacatcaatactgctgaaagtctaaatgcttattacagaaaaaagccaataaataatgaaaacgaatatctgattttctagcccccctaatgtaaagtaaaattaatcaagagtgggtccattcatccttttatcactaagctatgaatggaacataagaaatcaggacaatgcatttgggacagatgatcttctgaagattgtttaccacagctctcttttatttattgcagcctttcaaagtctttgacacagtagttcactgtattctctgagctcatcctgaaatgagctttctacaatcaaaattatattatccatggtaataaaagtaatggtaggttctaacaagccataagggcttataataagcagatattaggagatgtttatctgggagaagtgcacaacagtttggaaaaaggcaaaaataagaaataaaataaaatattagcttcacattagcaaaaattagtgatgtatttctgtaataaacataggtatctgcaggccgggcacagtggctcatgcctgtaatccaagcactttgggaagctgaggcaggcagattgcccaagctcaggagtttgtgaccaacctgggcaacacggtgaaaccttgtctctactaaaatacaaaaaattagctaggcatggcagcatgtgcctgtagtcccagctacttgggaggctaaagcaggagaattgcctgaacctgggaggcagaggctgcagtgagccaagatcacgccactgcactccagcctgggtgacagagcaagactccatctaaaaaaataaaaattaaaaaaaaaaaacaggtaacacaggtatctgcataaatttggaacttaggatattcaaatataacatcaaattatcaataatgatgaaaaataaaaatgatatatttgattacagtatgcaacttaactttcaattaaaattgtcttccccagaaagtatgttgatttttggaaaaagaaaacacaacagaactgcttgcattacagctacactgggtggtcagacttggggggaagaaagaaaagaaaaagaagccctgcactgatcaatatattggtatattaatcagggttattcagagaaacaaaggaataggaagcaaaaaattttctagtgaatcactagagataatagtggaaggtgacagttccatttccaccccttgatttctggaccaatgaattttggctatgggagacagagcaccacatattaaatgctgattcagagcacatacagccttctggagaaccttgcaccagtcctagaaagcagtgtcacctacctggtgttacaactgtgatttctttctcttttttcttttttcttttttttctttgagacagtgtctcgctccgtcacccaggctgaagtgcagtggcatgatcttgattcactgcaacctccacctcctgggttcaagcaattctcctgtctcagcctcccaagtagctgggactacaggtgcatgccacatgcccagctaatttttgtatttttagtagagacagggtttcaccatattagtcaggttggtctcgaactcctgacctcaggtgatccacccacctcagcctcccaaagtgctggaattacaactgtgatttcaaaaaaccattccaccactctatcaagccagcagctataggatggcaggaaacatggtaagaccagggaattccatgagcatatacccattgccatgcttctttggcagtgaagtaagttccttagtcagaagcaatgctgtgtggaataccaagatggtggataaagcattccgtaagtccatggatggtagttttgggagaagcattgtgtgcaggaagaaaaatgtatatccagtgtaaatatctatttcagtgaggacaaacggctgtctcttccatgatggaagcagtccaatataatcaacctgccacccaggagctggctggccaccatgaggattggtgccatattagggactcggtgttggtttctgcttctagcagattaagaactcagtggtggctgtagccaggttggtcttggtgagtaggagtctatgttgctgagcctatgcataaccccccttttttgccacaatggccactttgttcatgagcccattgggcaatgaacagggttggctggagaaagaagctgagtggtagctacagaatgggctattctatccactttattattacagtcttcctctgctgaggttatccttttgtaaatatttacatgggacacaaatatcttcatggttttttgcccattgagagagatctatccacatacttcttccccaaatttccttctcaccaatattccagtcatgttcctttcaagtccttgaccatctaccaaaccattggccacagtccatgaatcagtgtacagtcacatgtcctgccttttctcccaagcaaagtgaacaatcaggtgcactgcttgaagttctgcctactggaaggatttttcttcaccattgtccttgaggaatgtttcagagaaggtctgcagttctgcagctgcccactttcaggtggtagctgtatatcatgcagaatcttctgtaaatcaggcctgagtcttttttcctctatcaactgatcacaaggagctcccctgtgaggccacagaagcaggcgggagagagaaggtcctgtaataggagtgggtgccatgacaattaggccccttcttttcatgtaacttacttgtgccaagagcctgatttgacctaatctcatacaaagtacttccatttgatgatggagtgctgctgtgcatgcccaacttcatggctttgcgagtaagacaacactcagttcatggtgggaagctcaggtcaaatagtaacttagtagtgcatagttaagtattaagtctctactaaggcccagtagcaaactaagaactgtttctcaaaaggagagtagttatccacagaagatatcagggctttgttccaaaatcctaaggatccgcactgtgattcaccaatagggggcccatcaaaggctccagacagcatccctgtctaccactgacacttcaagcaccattggatctaccggatcataaggcccaagtgacagagcagcttgcacagcagcctagacttgttgcagagtctcttcttgttctgggcctcactgaaaactagtgaaaagcagtttactcagtaaatggactagagtaacacactcaaataaggagtatgttgcctccagaatccaaagaggcccactaggcattgttcctcttttatggttgaaggtgaggcaaatacatcaacttatcctttaccttagaagtaatatctcacatgctccacatactgacccctagaaatttcactgaattttcttgaaaattcattctctgacatgcaaatgtcttaccaataactatagagtagttgctacttcttgctcactacgtcaaatcagcatcatgtcaccagtgtaatagactagtgtgatatcttttggaagggaaaggtgataaagattcctgcaaactaaattatgacatagtggtagagaattaacatacccctgatgcagcacagtgaagctatattgctgaccttactagctaaaagcaaactgattctggttgttcttattgagaggtaaggagaaaaaggcatttgctagatcaatagctgcatactaggtaccaggggatgtattaacttgctcgagcaatgaaaccacatccagtacagcagctgcaattggagtcatcacctagttaagcttataataatccactgtcattctccaagattcatctgactcccgcacaggcaagttgagtgagaacataagaatcaccccgtccccgagtctttcaagtccttgatggtgcagtctttccaggaatgtagtgtttctttgtgtttaatatttttcaaggtaaatgcagttttagcagcttccacttatcttttcctaccatcgtagccttcattccacatgtcatggaaccaatgcggggtttccgccagctgctgagaatgtctactccaattatacattccagatctgaggaaagaaacacagtgtaggttcagggacccactggatccactgtgagatggaactgagctaaagcttcactgatcacctgacctccataagcctgtactctgactgtggaccacagtgatgttttgggtcttttgtaattagtgtcagttcagagctagtgtccattagtccgtgaaaggtctgattcccaatgcacagttattctggcaaacagctgaaggtccttttgaggaaggctcagagaaagattaacagtatacatttttggcactgtaccagggccctttctcaaggggacctgacctcccctttatgcaaagggttctgtgtccataaactggctctagtctgagacttgattaagggaccatgactctctttttttatgatgtaggctagacttttgtttaagaacgtttctgcttatcaaatcaagtaagatttagtaggctttccatctattttttcacttttaggaacaccatgatcctaaaacactagcaaggaacactagccaataccataggtctccatgaatctggctattctgattgctgcttttgaccttgcttttggcagtcgagtactgccacttggcccctgctgccctgagacccaattactccaattgcatttagatttcccaagtcagtaactgctattcccatttaagttctggcctgcagagaagagtggtcctagagctcttcaaggatgttgtggctctcctcacaatctgtttctaacaatatgggtagaaggtacatcttctggacccttttggtgtgtgtgagtaggtcttaaatgacaaattgactctagcattccagtctctctaagcctttgaacctctttctctgtgttaaactgaggcatgcctagcatttctaattcgctcactgtggaccaccttttgctccatgtttcagtcaaccaagcaaccaaactgccagagctctttcaaattccccaagttgcaatattaaatgcaatattaaatatctgccaagtgagctcatatcaataaattcagcctgattcataacttcatattcttttcaccattatcccataccctagtgtccattcctacacatgtttttgggatttttgtataagttaggaacttaggtagttcttttggagtgtagcacacctcttcacggatttcacttcctatcacacttttaggtgcccgctggaacttgagttcagtacaggcatacctcattttagtgtgctttgctttactgcacttcaaagataatgtatttttcataaattaaaagtgtgtgacaacaccacgtgaagcaagcctaccagcacattttttccaacagcatgtactcaattcatgtctctatgtcatattttggcaattctcacaatatttcaaactttctcaaatatttctgttatgaagatctgtgatcagtgattttttttttttgagacagagtctcactctactgcccaggctggagttcagtggtgtgatctcggctcactgcaacctccgcctcctgagtttaagtgattatcctgcctcagcctcccaagtagctgggattacaggtgcctgccactacgcccagttaatttttgtatttttagtagagacaggttttcaccatgttggtcaggcttgtcttgaagtcctgacctcaggtgatccacctcccccagcccatgggattacaggcatgagccaccgcacctggccgatcagtgatctttaatgttactactgtaattgttttggggcacccaaaccaaacccatataaaacaagtaaacttaactgataaaacgttatatgttttactgacccgctgatcccccatctctctccttttctacggcttccctagcatgaaaagtatttccactgtatgaatataccatatttgggttatttgttcatcagttgaggaacatttgggttgtttctactttttgactactatgaataatgctgttatgaacatttatgtacgagattgtgtgggaatgtatgttttcaggtctcgggtatatacataggagtggaattgctaggtcatatggtaactttatggttaactttttgaggaagggccagactattttccaaagtacctgcaacacttatattccaccagcagcgtatgagtgtccacacttcttcacatccttgccaatgcttgtaattatctgtctttttgattattactatcctagttggtatgaagtggtatctgattgtggttttgattcacatttcacaggtctaatggtgttggtctctttttatttgtatattgaacatttgtttatctttttagaagaaatatccattcagatcatttgtctattcttaaattcagcgatttgtctatttgttattgagctgtaagagttttaaaaatatatataatctaaatataagttccctggcagatatatggtttgcaggtagtttctctattttgtggaattgcctttcactctcttgaccgtatcctttgaaacacaaactttttaattttgatgaactccaatttactttgttgttgcttgtgtttgttgttatatctaagaaggttttgctcaacccaagggagcaaatatttattccaatattttcttctaagggatttatagttttagctctatatttaggtctgtgatccattttgtggtattttttgcagatggagtgaggaaggggtccaaattcatttgttacatgtagatatccagttgtttctacaccatttgttgaaaagactagtctttcatcatcaaattttttggacacccttattgaaatcaattgaccctgtatacaaagatttatttctctagtctcattctattccggtgatctatgtatctattcttatgctataactggacttcattttctcatatgtaaaattcaggaaatgagggtgttgctctataaggtttctatggtttctttgggctctaacatcatctatcatagcagaagaactactgtgagctctaaagaactacccccaaagcgtccccagtggtcctagtggcatttttttctctttctttttggcctaaaatttccagagtgacttttaaatttgagaagataatctatcatgtccagaaggcaagacttcccccctttatattttaatcccttatacattaacagaaaccaagtttttcatattagctagtcacctctttagaaagcacagaaaataggaagctcttcaaaggatttgaagcagctatgacaaaaggtaaacatataatgaagatacttaaataagagagaaaattcgagttgaataaaaagacaatgttgaggagaaggaagaatgtaaaaggcaggatagaaataatagatttaaaggaaaaccaaggctaagagaagctgctactattaatcaaaaggcttatctctgagtgctctgaattcaaggtgagaaagaaaagaaataactcttatggtgtagttagaaaagacaactagttcatcaagaaatacttttaccagttctgaattctacaaaaatgtatactgtgtacatttaatatgattttgaataaaataaatgacactatctttgattactagcttataaattacataaaattatttatattggaacttaatataatttattactgataaacttgtaaaattgtaggtgattctttgttaaaacttgaatactggtatccaggcatatcattgttatagttatatgagccagtacaggagtaaaacatgaggaatacatggccactgtattccttagtctcctttcaattatcaataatctcagccagagattaggaagcatctctaaaatatctaatgtgaatctttaaaattataattcacattcacagacagcaaaactaagtagttattgagcaataaatcacttgttcatatggcagaataagaatgaatgcctggtgtcctgagatggtcctaggatagtgtttcctgaaccattctccgatttattcaaaactactttatgaacagttgggaaattagatgacttggtttgtggcaatgaagtaccatttcccaacatagtttatttttctgtaaatattttattttactactaagaataaaagaaattgctgttatataagttgcacagattggaaaacattggtctgatcaaagttttatgataaatatccttgctttaattgtaattaattgattaaaaacacaaatgagaagcaaagagaaaaatgtacaaagcaatagcaacatatccaattttgggcctagcaattataattatgggtttagaacatccaatctgactttgagataaatttacttataagacttcctactaccaattctgttctttctttttttattcatagaattgataaataaccaataattttctagttatatttgcctttttttcctataaatcctcacaataggacttgtagtccttcattagtataatcaggctgctgaaaactttaacccagttattcgtctattgcctgtcttttcctcaatttttgtttgccctaaaccaagacaccatttcaaattaaagtcttctactataatgttaagttagatggggggggcgggaaatatctttgcattaaggaccaaaaaccacatggcaataaagtagagtgcatgagggccataggcttgcatttttttaaatgtaatttagttaaattctatttttgctgcctataacattggctagaagggttgatatagaacagtgtggatattaaaaactgtagcttgcaaagttacttgtcaggaaggctttctttttaaaaggaaaacaatacaatgggtacaacaagtatcttaagtatagaaagaggaggctgggcagggtgtctcacgagtctgtaatcccagtatcttgggaggccgaggcaggtagattgctcagtccaggagttctagaccagcctgggctacatggtgaaaccctgtatctacaaaaacacctagccaggcatggtggtggacatctgtagtcccagctactctggaagctgaggtgggaggatcacttgagctggggaaggcagaggctgcagtgagctaagaacagagtgagaccccacctcaaaaaaataaataaaaaaagaaagaaaagagcagtgtcagtaggagttgggatggttaggtttgaaaggtttaaaaaaaaaatttaaaataacaactaagtattattgttgtagtgcttactttgtgcactacactcttctaaggactttgcattccttaactcattgaaccttcaaaagagcagtacaagttatgtactattagtattccagttttaaagatgatgaacttgaggtacaaaggtgttaaataacttgtctaagtttacttagctcttaaaggtcaaagccaaaatttgaacccagaggtcgtactcttacctgttctgtcaacattctttccaaatgtgctctagaaaacctggggcatagtgaagaacttgtaagactcaaaggacttttacatgtgtaaagaagggaaagaagtttcttgaagaaacagaaagaaatgtattaatgaacatatatgaagtcatgtgcaccatcttatttaatctttcacaacagaatggttagtcgtgactttcctccatctgtacaaagaaggaaagcaaggttcagagaggtgggtaacatgccgaatatatgttggtaggttgaggtggatcttgagttcaatctcaaatttaattccaaggtccatgtccttttcactgcagaatgctataggatagaagtcaaggtagaattaagacagaaaaactgtcctttcaaaagaaagaacagtttatggttgagaatgtgtatagtacttgaagagttagaaaagtgcatgtagccaaatgatggaagattttgttgccatgtatgatagggtaagcaatatcaaatgctataacagataagtgccaaattctcagaggtctctctctctctctctctctctttctctctctttctctcctctctctctttctctctcacacacgcacaaacacacacacacacacacacttgttactctcatcataggtcagagaagatggtgccaatcaggcagcctaatacaaggtcctgcaggggccaagggtctttccatatcgtggacctgcctttccttctaaggcagaaggacctgccttagaaattccttctatttctaaggaaatagaacctcactgaggttctattcattaatttaatagaaagaaaaaaaacttaagtgagaggtttttttttctgttttctgtttttctttctttctttctttctttctttctttctttctttctttctttctttctttattttggctagtcttagaagtgcattctgcacttctagcaacatcccactggccagaacatttgctatatagtaaaagtggcattaaagagaaagaacccagtaatgaggcttggtaatggtccccaaaagagagattagagtcaggaaagctttacagtatgaggagatatttatttagtacatacgataggtcatgctctgtctgagccctgggaatacagcatgtaacacagataaggtccttgcctttaaacagcttacatcctgagaaggggtgagatggaatagacaataaagaaatgaacaaacaagcaagcagacaacatcctttcagataacaagtgttttaaaaagaaaacagagttctgaaaaacaggatcctgggagaaagggatgctacttaagattggatatttaaggagtacctctctgaggattgacattttagtcaaatagcgagagccagctatgcaaagatctgttgaaacagtattctgagcaaagaaaacctctggtccaaaggcgcaagactggggattagcctggtgtgctgaaggaactgacagaggtcagtgtgtcaggagcccctaaaataagaaagaaggtcaaagttgaaaaggggtttgatcatgaaggtgctagtaggccttcatgaggaggctcaattttattctaagtatactgagaatcctccagatgttttattctggagatgtttattccagatatttattcaggagttatatgattcaatcatcactctcacttcctcctgaagccttgcacgaccattccagaatatcatcatcatccccttctctttccatatcatgggcctgcctttccttaaatcactgaggttctattcattagttaaatagaaacaaaaagaaaaacatatcttacatgagagttttattggctagtctttgaagtgcattctgctcttccagcagaatatccagttggtcagatatcccatagcaatttcccttgcttcaatcacattggtacttctggaaatatggatatgcaatctccttaactggaatgtaacctcttgaagagcagacttatatttaatttgtggcttcctcagtaacaaacacagttccaagaaaacacttaggtcttgagtaactacatgaataaatgaatgatgaataaataaataaggaatgaaaaatagttgaaggaatagagagcagtatcctcttgtatttggagtctacaacgtgctttcacttttactgtgtcatttgatccacatgagcacatcgagttcatgggggagagtttggtaactgcacaattatgagatgccagagattagaagtcaaacagaaacgaagatgttaaggctgagcactgagaagaataatggaaccactttggaaataggggatcaggaggtaaagtcaatttggagtaggggagggaggtggtgagagaaagttatgttctgattcagctgataaaaggcagaaccaagtagaatgcccagtaggcaagtaattaaaggttaagttgtgtgatgcagacagaaagagctgcaggagttcagataaatctaataaagaaaatggatttgggactgaggaatgagaatagacactgaagtcgcaaaaagttagactgctgggtgtaatgacagaaaatatttactgaaaataactggatattgggaaaaaggacagactaagtaatgggaaatagatatcaggatatattaattaagataagacatcagaaataaaccatagaagaaaaaactgaggagctgccatcttccatttgtttaattaaaaaatgaaattactgccctactcacagtgctactcactgaatatttccaatttcctacctccaaaacagtggacataggactgtgttatgggatgctgcttcctggctactttgcagttgaggacactgatgtgtctggttctagactgtgacctgtggctgaatgtttgattgccaatacaaaactctgcaaactttcctctttctgacttcataattagcagtgttcaagtaggtgactgctttgtcatccaggatccctgggtgatatagagcataaacaaacaaacaaaaaaaagatcgttgtcattttaagccactgagatattgagggtgtttgttactgcaacataacattataccctgcctgatgctctcaacatcagtgcccagtaagaaaggatgaatgtggagtgaaattgaatcctgtgacaggaaacagtggggaaactaaggatcattaaaaaaggaagagacatcaagttggcaaatgatactgaccaatcttctaacacacttatccccgaaggccttgcaggaggatagaactggaaacttcacggcaggtgtgtttacctacccatccatgccccctccagtgaaaagcaggatagggcaactccttcaggatgatggaaaatgcctcagactggctggctgtgtcactgtccttgacttctcctcacaactagtatgacaggttgatgtggccgagcgtcagaaaatcgagagaacagttagcagtgcttccaggtctccagagccacaatgcctatgacaaaggataaaatgaaccagagacaatcataaccaaaattataaagtaggacaacaatttataaacaggagagagtaaaatgcttgattgggttctgacaagaagaatatatttagaaagataaaaccaagcttacaagaataaagcagaaattgattttccatataggacctaccaatgtagagattagtaaaaggaaaagaagacaaaaaaggtaaatccatttttgttcctacaacgtgcaacatattcgtgattttttttccccatggaggagtgatgggagagtggaagggaagggaatgaatatatttttcagctcaatctttgactacttctcataacctaactttaaattttaggatttgtacttaacactatattgagattgttattttaactggaattctaagatttgtgaactgtaaatgaaaaacatactcattaaattttattttttcttgatactcaaaatcatatttataaaaaaaggattttttttttttttttttttgaaatggagtcctgctctgtcacccaggctggagtgcagtggcacgatctcggctcactgcaagctccgcctcccgggttcacgccattctccttcctcagcctcctgagtagctgggactacaggcgcttgccaccacgcccggctaattttttgtatttttagtagagatggggtttcaccatgttagccaggatggtctcaatctcctgacctcgtgatctgcccacctaggcctcccagagtgctgggattacgggcgtgagccaccacgcctggccaaaaaaaggattttttaaaggagaaagaggtgcaaacctctttagttagtaaaaactaactagagaattctcactaacaaaaggccttgttaccaggatagatggtcaatttgtgactgagttgtagccaaatcataggtgtgggataatcacactatatcaaaatttaaatgtaaaaatnnnnnnnnnnnnnnnnnnnnatgaaccaagagctccagtcctcctggtcatatttaatagggaaaaatatgtttggatggattgatggatggagggccaaacagatggatgtatggagagacttatctaatgaggcagcttggtattttgagagagcacaggttttgtgtaaaaaaaaaaaaaaaaaaaaatccaaactggtttttttgtgctaaaagcagtctaattaagagctgagctgctaaaatcagtttgcttggcttaaattttggtgtgtccacttactgctgtgtggccttatgcaaatttcttaaccttcctgagtcaccaggttctcattcatataaagagaatttgaacatctattatatgaagttattaggaatatacgtaataactatcatcaatctcagttttctttgaattgcttatctaaagaagtttatctcaaaagtatctttgcctatgtcttaaacatttattatttatactgatttggaggaacgtatttgttctgtcattattgattacctgtatgatagtgtcttagttcatcacagaaattctttatctgactccaaagcagacacttaaataggccatgcatgttagcacttattctactgggggcttgaggtgagtgggtattaacacaatcaaaccaattgtttgggtttgtaaaaacaaaattagtgctttaatctatttttatactttgaatactagtgtaggtattaaataaagagcttaaaccaagaaaaaccataccatcctgaatcttaggaaagttactttgttgttgttagagaaaaaaacaacaggtttatttataatataaaattaacagcaattgttcacaaagacgactttgtttgctactcaaaaggaccctgtgagtgttcctatcctgattttgctgatgaggaaacggggagaaactgttaggaggtacattccttacactatgtcctatggctgataagtgaagggggccaagatctgaacataggcattctggctccagagcccaggcttctcactacctcattaaattgcctctcaaataatcataccgtgttaaatgggctggatgggaccttggagatcatataatcctgtctctttgtattaccgcttgtaactgtaaagcagagagaagttaaacgatctgcccaaggttatacacttccgtctctttcccaacataataacacactctcgttgaaactcatttctaggatttatacaaactaatggcaaagtcatgacattttttaattgaatgcccaataaaagaatcattttcatcttgttttaccatctcatgtccatgagtaaaatgttaaaaacgtgttgcaaagccaaaagggtccttatcttcatgaatagcctgcttttttatagaagaaggaaaaccatcactaggctgagtctgttttaaatgaaataagtatgtagtcattttcttggtgaagagaatctctggggcattaagggaaaagatggcacatctgaccttctaagtcatgtaacttcaacttagacaatatatgacttcaagaaaagtatcatctttcctatagttgctggtcttatatatcttatgagatccttcaggtcacttcactctggtttcaggtagaaaaccaatggggctaaaagtgctttgtgtttccaacagaccaatcaattttatttttaactgttaaagtatttgttgctgttcagtcaatcttttactcttgctttagtcagacattagagaggatgattataagtaagtatattatctgaatgatcttctgatttcaaagtcagggattattttccttgaatgtttaagtggtcatctctaccttttccaaagccagaaagcaagaaaggctgtgggtcatcttccttgaaaaactacataccacaactgaacacaatttaaaattgcagccattagattaaaatctctctcaagggttctacacaagggctcattttggtgttttatataaaggcccagctccctgaccaactttttgaccttagttgagttacctaatctctctgaacctcagcctctctacctgtaaagtgggagagacaacagtacttacccacaggatttttataagagttaaatcctaaaatgtatataaaatttttaagacatgacttgatgcttaataaatctcagatgttatctctgtgaattcagcattcaattacaatgcacttatctagttctgaggcttccgtttttatctttaggcatattatggacaaatatttttgccgctctgattctcacgctccaagtattcattcatttatataacacattcactgactgtctgctaagtgtcaggcattgtcccaggcactggagctacaaagtgagcaaaacagataaaaagttccattattgagcttaccttctattaggaaaacatgataaataagtaagcatatatgtagtttaatataaataaatgctcaggtaaaaaaatagtgtagaagtgacacaggacttattaggatatattggacaagagtgttaaggaagtaggtcatgaatattgcaatttcagataggatgaccaaggaaggctttcctaaggcagcaatattttagtaaaaatgtgaaggagatgaggaaacaaaccctatgactatcagatcatttctgtcccagatcacagcaaacatttatgtaagcaccaaccacatgcactctattttaggtatctgtttcttgactctgtatgtcccaatttaacccatcaactccccgccccgcccaacctgcagtatttctgttctattcttctaatcatgcaggcgaagaattaaccatgccattgctgatgcttgccttctgttcccctgtccgtgcatgccaatgtccatctactcagctgctaagtcctaaaaatttatctccacagttctttcacatttactgtattctttttgtttctgttgacaccagtgtagttcagacccatagtacctttaacttgactatcttaataatcacctcactgatgcctcaaaggccagcccacagtgatcagttcactctttgtagacatccatgggcttgtcagttcacaatttcagaatcttcaggaattccctgaatcaaaataacaataaaagaggttgggcaactctgtggcttgtcaacaacatgcgggctctgggtcagctcacagattcctttggccttctcatcattgaaacaggaaggctacagcaagcagaagcagcacaataaccaaaggcagaaatgagtaagcctctgtatcaatgaaagcttacactttgctatcaccaccaaccacagctgatttcttttcatcaccatggttgtgtcacatatgtgtgcttatagcaatcatgggaaagggaacaccaatcaacatgctttccctcaactcatgaccttctaatatctgaacagattcaaggattctttagcaaggaagaaagggagcagaaatggcttttggatgggcagcaaataatgtctgccaaatcctctactgaataaactattgactatgatatgcaagccttctgagaataaccttatttttccttcttcaacatggtttagtcagtatgtgctctggactctctcatctccatgccctagatcggtttgtctcaatgtgtggtccagcgactaagatattatttgccttttttattctcattcttacacaaatgcacagtggagttttccagaggctacttgatatgtgctcttcaacagattcaatgaagaagcaggtatagaatccagctttgttgtattaagccaaggattaaaggggttttcaaaaatgtacacagtgccattcttctcactgaatttatttttagaaagcatattcatttttttaaaaatgttatctatctcaacatgcaatgggtatgttattgtttctaaatccatcgataaatacaaattttaaatgcctcaattgcattttctaatatgataaatatcaatatgtatagaatgcataaataaaagctctttggggtcttccaataatttttaagattatgatggggttctgtgagaaagtggtttgggaaatgttgtcctggcctagattacgtagcatcttctacctgtgatgccacttcctccatcacgaaatgctcatcctaaaagatttaggtcagaggactcttcctcagtccttgggaggaagctgtcattccactgaatctcaatgtattccttttctattgctgcattacaaatcatcctacaatttagcagcttaaaacaacaatgtttatacctcagagtttatgtgggttgggaatctgggtgtggcttagctgtgcttctgacttagggttcctcctacaactgcaatcaagatgtcagccagggctgcagttctctcaaggctcagcagggggaagatccacttgcaagctcactcatgcgtctgctggcaatactcaggctcttggtggttgttggccaaggtgtcttgacaaaatggctgaaattccctcccttcccccaacccctaagaaagagatggtaggtagagaatggacgtggggggaggggggagaagaggtggatgccagagtattatttttataatctagtcttggaagcaacatagcatcattgtggcctgttatttgtggggcccaatgcaaaagaaatatatgaagtccctagttcaaaaagcaggaagaagttcccttaaagggttttttctttcttctgttggtgtctttttcttgacttcctatggtgatttttacttgctttgtcattctgagtagagaaaggttaaaattttaaataattagcataattttaccattcatttttatattgtactatgccaggtttagatgcaaatataagagcatctaatttttatatagaatcaccaaaattacacaatttgtatctcatagcttatacattcatgtgtatttcattcttacaagaatagtggaaacttacacaaaacgaatttaactgtttttattgcacatcatgatgctcacgcattctaccaactctgcctacctttgcttgctgataagaaatgactgaaaggaaaagaaaatacagtctgccctgtctttttccaccagtgtcataattttcagtataaatggttggctaatccagggaagtcaacttccacacatccagggaagtcacacacacacacacacacacaaaacagtatgatagcgttccttggtcattcgtatttctcaggacattattgccatctttctctgtgataaacaagctctggtttgaacaaaagaggcatcttgttggggcaatctgcttcctccttacttactcatagaagtaatgcacttgtattagtctgttttcacactgctgataaagacatacccaagactgggcaatttacaaaagaaagaggtttaatggacttacagtcccacatggctggggaagcctcacaatcatggcagaaggcaaggaggagcaagtcacctcttacatgcatggtagcaggcaaaaagagagcttgtgcagggaaacttccatttttaaaaccatcagatctcatgagactcattcactatcacaagaacagtgcaagaaagacccccccccccataattcaatcactcccactaggttcctcccacaggagaattacgggagttaaattcaagatgagatttgggtggggacacagccaaaccataacagcacttaccttgtacttgctttgagtctcacgagttcccatgactcatggggtcaccagaatcctgcgctcatgaggcactgagaaccatctatgtgaacaaggtggcaaggggaggaggcagacacacatattgaacacagctcatggagctcatgctctgatccattgtctcacttgacttcatttacaaaattcaaagctaaaatgattaagaatatcaagttgatgacaacagaacattaaaccaagttcaggactctgtgtgccctgtgtgcactggccacatgcctgtaaagccagccctgcccatcacttctcctgttttacaagaatagttactagttacagcccacactcaagggtagggcattacacaagggcatgaataccaggaggcaagacccttgaggaccattttagatgttgctgccacatccaacatcatctttctgttttgacttgttcttttctttcgtatactctctatatagttactcatgtacatattattttgtatactgttctatgtgataatctccttaaggatagcgctcctctctgatatatatcctgacatgcctttatcatatgtaatatacaacacaaagcaaggactgaatacatgcttttggaatgaatgaataagtgaattaatgatgcagtggaactttgatttaaattctggtaatcagtctttgtgaaaaattaccataatgagaagttgaccttaatattttcctcaaatattgcaagattaagactgtcgttattatttcagatccttatttttgcacaagccacatatactgatttctctttattcccccttgtcatgaactgtcccccctctaaacatggattttttctgacctcttaaaaaatcttatttaagttattgttaggggtgaattattgtacttgaaaagaaaattaatgatacaagggacagctggagaatatctggagaaactgttccattggcatttatatttttattttggactgcatcaaaatggcaggggagctacgcccttttaatggcttgcacatgtggtcaggcattgtgtgagcaaataatgcttcccagtgcttgtattcaattttcagaaaaagaaaataaaaatgaacagnnnnnnnnnnnnnnnnnnnnnnnnnnnnnnnnnnnnaagcattttcttcagttttcttcttcggtctatcccacaatgcataagctttcacttctagatctgtttcaagggtcttttataatgacagaagctaagtctttgtttccaagtagcagaatacagaatgcatcagtgtgccatttaagaaaaactgttttgtcagtcttgtttatgcactcaagataatacagtgttttaaaaaaaggctggactcaacctctgcctgtttattcaatataaacagaagcatcccttttgacgttgtaaggacaggatgtgtgctaatttcaacaagtaaaagccactgcacttggccacataaatccttgtctgaagcaaccttgctgcttcacaatattgtgaaagggcacataaaggatgataacgatgatgcgcatcaaatattaatgtgcattgacacacagtcgtctattacagcaggaaagtacccacagtgagctgctatagggttatgcctcccttcacctttgtctttacacttgagctttccctccacttcccatgcctaagtaaaacaaagcactctgtaccctaaggagcaactccaggaaggtctggcagccaagtgactggtggcctgtttagttaaaataaaacgcctattgggctaatgtgtgatcaagagaggattgacatttattgtttcaggtttatgatactgtgaactgagcaaaagtgaaagccacttgggggcttagggtggggaggggcgcacaggggcaggagttcacaagcaatgaattgtattttttttctttaccattttcttcccagcatgttagcaataaatgcattgtctttttatcatgttttatgtaagaatgtatgaataaccaagcaacaagtcaactccgcagtttagaaataaatgtgttggttaaatagttcagtcagggatgtatttttctctttgtattaagcggcaaaagcagctgtgctgtatctgtgccctgcattcagacattgtatctcccccttgtggatcaggccccctcgagctagcacccatcccatatcctgcttcattttagaatagtaccacacctaaataggaaggaagcaccaggaatctgtttatgcaattctaaatcttccaatttaaaaagacatatgccgaaaaatcaacatattgcttccagacagagttttttattattatggcacatctacagatctcttcccatagaaaatgcaagtactgaattttataccccacgataatatgctgaagcagaaattttgctttttgctacacagaaaacaatttctacactttataagtgatgcctaagtgagagttgcaccaacttcttagatttgaactgtgctgttttccatgtcttcttatgaagcaagtttgggtttttggtttttaacaagaacgctatatcattaaattaaaaaaaaaaaaaaacccttctgttagctgaatttttgcctcagataagaccttacccagcatcagcttaaccagtaacttcacacttggttgtaggctcatccttcatcatccccgatcaataattcaaaagctcaatagaaatgctttaaattgaaattgaacacaccattaacagtcctagaaaagtgggcatcattcaaacaaaacaaccataggcactctgtccatcaccaacacaatgcttgatatagcttgaagtctggattcctcactaactaccatgcatttccctcggatcattacttagtcctgagtgagtaaacttctgatcacctcccttcatcttggcattagtctatttcctttataataggcaacagtatacctcattcattccctctttgttcgggcctctctgcttttcgttaattttctcctggccaaccagccaactctggctccctgtggttataggaaattatccatgcaatgaacttaatttagaaaactctgctgcataaagaggtggcagaattattcttctcatagtccagtctatgttgactttcatgctacagcatttcaacagtcattgacatagaaatagatgcttaatttaaaatgtttttgcaaaagtcattggacgattgataaataaagccgaggctagactccaaataaagtgcttaaaaaagtaaaattctggcattcatcttccttatcccttaatggggaaaaactctcatgaaacaccaaccatatatgtactccgcgagtatatattttaaaacgtgtctccattattagaaaatgtgcctgctatgcacacttaaaataggtgaattctaactcaaattttaaaattttactgtagaataattgtttttaaattcattcaggaactaccagtgttctccacatgcctgacacagctctattctataccatgctaacataaggaagcatttcacttactttgataaattgtaaagcttctctctttctgcttatgaaagaacaagaatccatcatatttttaaaagcaaaacaaaaagaacaaaatactgaagggcactcctgaattttttacaatatacaattttatgctatatataaattgaaataatgtgttggcctaatacagcttgtgttgacttaatgcagcttatagtagaatgaagagtgggaagtatccataaaatataattctattttagtatttatgataaatcaactatggaaaaccctcatctatgggaaatacattcaaaattatcacatgaatagagaaatatgggaatattgtgccttagcaatcataaagatatgcataggagatttgtgactgtcacaaggaatatctgtgaatttgtcacacattcatccccaaactgtccccttggcagtgttctttcacagaattccagaagaaacactctatttagtgttaatctttctttagcatgccttttaatcactttgaagcttgtgattatctttactcaatgagagttgctaaaccttcatccaatgagtatagtctgcccccaagtcaggtgatctaaggataatagacatatcactaaaaaggagctatagaggtgatgagaggaaagctctcccagtttaattctgtgtctgactagcagacctaatgaaattttcccaactaataaatagaaacatagacagaagataaacaaacagacagagatatgaaaaagtcaaattagcataagtgcaaagccaataaaactggacttaaaaatttaatcaacaccctccatttctttgtctgcagaaacaaagagtgcccacccctacctccagcctattttgaagaacataaggacaaaccaatcaaaaactgtgcagcctttcctttatagattgatgttgcttttggagaaaaaaataatactgtcatcacctttctgtttcccatgagttgtcacctctctctcaaaactcaggcagaaattacagttcctagcgtataattaggcatgacatagaaataggaagtacctggtgttgatgtagttcccacaagaaaaaaatgctacaggcagaagaggtagagaatataggcagagtcatggatgttgaaaatatccatgattatagatttgtgtgtactcaatctattcatgtcttagagggcaaaggccagccattttagataaaagcctaggcactcggctttgaactaagaactttgtccatcaacctgccaacatagacaaataagggaatatggccagtgtgcaagaaaacagaaaatagcataaatcacaatccgtacaacttgcatattggcaaactaggtttaggtaaatcaggacttattcaaagatgaataagcaagtaaaaaaaaagataaaaaaatcttcaatgtcttttctatcttccatacttcataacaaaaggaaatcaaacataatacttagtgtgactgattgggagatacttacttcataagcttattgtaataagataaagaatgtaatttatctagaaagcacttagcacagctcctggcaagtagtaaacatccaataaagagtaagtattattattattgataaacaattgaaactaaagagatgactcaaaaactgctttcctgagtccaagtaaatccaaaaaacaaaaactcagtgcagattaaaagaaaaaatctcaggcaaaatcagtgaattagtgaatagatgcccactccaagatatatcataaaataagatttcaattataaagacagagaagaaaaactgacaaatatccaggtacaaagaaacactttgcttcctctatcagaagggttctaccaaagaaacaaagccactactaatgttacaaaattagggatgtttcatgagaataagcccctacacatttgtgagagctgctaaagtaataaagtagaacatggtagggggttgcctctgcatgttgagttggtcccaaagtcactatagactaacagggttattaatcaggaagaaaagttgaatgtgagtcaaggacaaaccagaacatgcaaggacaaactggaccacatatctctctctcctagccttcaacttcaatgatgaggatgacctgtagaagatgaaacctttactatgaagctgcacacccacctgggtttggactcagagaggcttatggaggagatctagtgggagcttgagatgctgcaggcctccctgctgccccacaccaacaacttgaggcagcaacagatcagcagtgatcagtgtgatcagcaggtgcacctggcaccctccatagatgtgcagagactaatgggtatagcttcacttccagacaattctcttatggccaacactaacccaaaaccgtgcacaagaggatttctgtgaaatgcagttgcaacttagatacctacaaaggaacaaaaatgagaatgacctcaggcttctcttctacaaatcttaattccaggcaacaatggaacaatggcaactgaattatgaaagaactaagctatgagctaaggacttagttcctgtatttgcttttttcgtatccgaagacatctatcctccttacttcagctcacacagattttcaaaattccttagatttcccacacctccatctgcccctgctccttttcagtttgaagttcttctccacagcccaatgttaccatgtactatgatgctcttgggggcagttctcaaattcacacttttgcttgcgtcttgtcacttagttatggcacatggagtcctgcatgttattctatcacactacctttctatctcttctttccactttggttctagccacgttattctttaaattgctctcaggtttactatggtctctgttctttcagtttggggcccacacataccacaaaatcagtacctaggaggaatggtagagtctgctttgaaagataattctcttgtgtctgtttcaccctttgtctttttctatatcttctcattttctatatcttctcatttttcttactttttcaaattttattctattccctttcttaatttctatacttatttaaagggagaaagtactctggaaccttcaataatcaaaattctattttctttctttgatgttctgcttcagcctagttcttctaagagccctgtgatcagttctcctaggaaagtgactggtaaaatcaaagaaaattgagtaagtaagtgtcctcaaccccagagtagtattggtgtgagaatttaaaaagaaagacaacacctgtgcttgcaaagatacagtctctctttaagatgtaagggaggactaggtattcttaaactttttaatatgcttttcaaactactctgaatgatcaatgcttaagaaaaactattaaatagataaagtgttgttgagtattacacatttgagaggtcactttaaaatggaacaaaagttcaaaagtaaaacaagaaatgtattttgcccttaaagtattagcatacaattcaatatgctgttgaaagcacagacacagagatggttgcaagtcaaatgaaggttatattataattgatactttgaattgttaaggagaagcaaaggtgaaatggaatgcttttactattatttttgttgaaatcttattaaaaacttttaatggaatgcaaactagagaccatcttcaaggtctcaagttaaattagatatgcagccattaatagtatcccttaccataacactttttgaaaataactttcccaacacagagatgggctaatccattttctaacttatttgtattttctttgctatttcagagaaattcatgagctcaaatgatataagatataatcatcatacttactcctgattctcaaatatagttgaaaatatctggattgcaatttatactaagtatatacatatatataaaatgagtaaatttagcattataattcagtggtttgcagtcatgtttaagtgcttgagcacctgaaaatcttgatatttggtgaaaatgttcatgaaataacgacattttaattgaactgaattagaaggaaattcacctgcagaaatatgactttttatatgtatgcaagtctctacacataaaaagtaatgattcataacatatatttgagaattaacatatgtaagatttgccttgcttcttacatattcttggttcattcattttgtcaaatttagcagcacatgccactaggcaaattgaagaaccaacaatactagggaaaagagggtagggaagaaaaacttacaattcagaacaatttcttttttagcttgttttcctcagagcctggaaaaaagctgttattattttattttagtggcagaacatcttggttgtgctcccaacagaatggtttcctagaagcatagtatgaaacctactattttagtgtgtgtatctgctcagacacatttctgaaagagaacactttatctatgtgagcaaagaaaaatagtataactgcagtaaaattttcacattatgaaacctcaaggcctttaaaataattctcatcatccaaaaccaattctccatgtagtgttctaatcattttgaacatagtttacatattattctaattatttgattaaccgcgcctgtcctattgaatcaccatccagcaccttttcaatgccctttattcttagtaaagaaaaatgtgcaaactttaatatatcatcaggaaaagccaatgcaaaatacaaggaccctgaaaaagaaaaaaaaaagacaacatttaaaaatgtaatattttgtgcatgttataatcatcatttcagaggaaggaagcaattctaaaaacaaattttcaaagctatttttacattaacattattttttctaaatgtgcatccattatagtagagttatcttttccttccttaagctcagaattaagtcaatttcctggtatgcaatgtggctttattttttttgttatttaaattgtttagccaaagtgagatcagcaactacttatttatatgtttgagggcactgtgagctgaaataacaaattttgtataacttatctaactaaaaatatttataatacttctcaataatgattctaatgaagatgtattgagtaatttattaccatcttttatgttttaagagttctgatagtacaagttaaaaaaaaatagcctacttctactcttttactgaaatcaaatagatggcatgtgatgattaacataaaaaagaacacattcaacataatatattgcgatagtggcagtctaatagaaaaatagcaactatttatttacttttatttattcgttttatttataatagatatgtacaaaatgtaaaattatttctaagaagatttttctttaaacaccaagcattacagtagatgttgtctgaatgtgtgtaattgagaataataatattgtataataatattaatatgattgtggctagaaggaatttatttgatcacataagtacagcaaattaagaataagatctcagcatatcctggctactacataaatgtagcaaagttattttgctaccttgaaaaaaatacaagacaaaaaattgcctaatttcatggaaaaactataattttgccagttaatacatgagattctcaaattcacgaatttaaaatgtttaaataattatacttttgctgcctgaaaatatattggatcaaaatttcaagtaaatatcatcaggggatttggatggggaagagcaagaggggaagaaggaggagaggagatttagtctagcactatttccagctgatccccacccagcattgccaagctacaggacaccaattcaataggatgaagtcagtcaaatcctcttttaagtaatggttgaataaaataaaatgaggggaagaaaatcaagtactctaaatgattaaagcgtatgaataagtgaaaaatgtttgcaaaattgagaaggaaggagaatcgggaagtggttatttatggtgtctcaatatgtaagggtaaaaaaagaaatttaatataataaggataagctaaaagcaaagaggaaacgttgaagccctttacctctcactctgtgatgtatagaaattctaacacagctagatagtttttcctcctggctatctcaagtgagtttgccaattagaaagaatatttgtttattgagagagaatagaaatctgagactcagataaacaaaaactgcctctaacaaggcttgcattcttacagactccagtagaatttatcatcctcatagaatcaaatggtacaaattctccccctcccctccaatctcttgctgtgactccatcaacaagccaaaggcttgttatctttgataagcttgtcacctgaggtaacagtggagaaagtgagggtaaagaggtgaaagattacagtgagaggtaagaaaggatatatcaactctggctcataggcttctaacttgcctaggtggatgtagatgccaattactgaggagggtcaactcaagtagaagcaaatttctgagaaaagaacaagtgtttaatttttaatgttagtttatggtgcctatgagacacccaagtggatatatgaagcaggcagttgaattctagtggttgggttctaatggattctggcctggagaaataaatttgaacgtatcagactgaattgaagagactgcctatagagaaactgcaaagagagaaaaaggggaattaggactgagctttaaagaacaccaacctataaagcatgaaagataaaaagagatattaaacaggctgagaagggggaaagagaggtacaaggaaaaccagcgagagtggtaacacaacaagtgagaaaaagaatagaatgttcatctatggtgagtgctgccaaaaggcataatgagatagttaatccaggcctccacatttctccactatattgatatatggcttttgaattggtctccctgcttcctgtctcaatctctccaatcgattcctattcctcctgacagagggtacttctaaaataggcaactctctctgtcattcttctgctcccattcttcaaagctccctgtgtcttcaaggtccttagcagttcatacacctaccacatggttaatttcaaagtccttagcaggtcatatacctgctgcatgacctggccccacctgcctctccagcctcactgcactcctctccccagtgcatgggaacctccagctctaccaagccacctgtagctccttaaacaatggcttcatgcctctgtgtttgggcataaactctttcctctatattggagatttgtctcccacttctgtgcccaaccaagtcctactcnnnnnnnnnnnnnnnnnnnnaaaccttgacactccaccacaccccaagctcagttaatcatgcagccttgcatttgcctctaaaacaacactctgtaattaatttttttgtcttttcctcttaattgtagggtattgtcttgcccatctttgtatccaaaaaaacagtgatgcgacatgttagatattcagcacagatctgttgagtaaatgactaaatgaatgaaaacactaaaattctgctttgcaatttttcttctacagctttctgccatacttctttattactcaattggaagatgtaatatttggtaatgctcaagaaaacacaacttagcttctttttcctcatttcatttgaggatagcaccttttggactctgattttcattctttggctgcaaaagagaaacatccagttttactggacttctaataactagctgctaaaagaacatgaatgaaagtgtgaaaggctgtaagatggactcacaggatccttggcatatttcatctactgagagcagggtcttcttaagccaggagtcagtattagtgtctcacagctcatgtttcggttgatgaggcatgggatcaaaatgatattagtcatttgattgagtgccttatgcagatagttactgcagagttttaggttgccatgatcaaactgtagtgtccaaaaagattataaaataaatgacccttgatcaatctaacctaattttgacttgttaataaagaaaggtagacatgtattcaccaattaattagacaatgttgaatgaaaatgaaaatcatcccattcagctccctataccctgatttctaatgattttcttaagagttaattgtatctctcaattcaggggatgctgtcagctttggtccatgtgcaagttctgtcttatgatatggccacaaccccaaatattggtaccatcattgttctctgtttaaagtagtctttagaatttataggccaaaaagtgagtacctttctgtgtgacccaaggcattgaatagatatattgatacatctctgtacagaccttatgtttaatcaacattcattttaagtgtcttgtcctgtgaaaacttctatcattttctaagactataagcctatacttttagttagtttaggctgacagtgattgcttgaactatgacactgtattatgatacagtgagacaacaccaacatttgtgacactggcattatgcttcaaagaaaagagaatggaccctagtctcttaagtaacctgacagctctggttccactttccacaatatgataccaagtaaaatcacatgtattttctcatagaaacgagccttcccctaaatgtcacatttcaaatgttttcagctacttattaagtggtcaccattgtttcctgcatatgtattatcttttaaaaatatagttgcccttttatttagtgtggactgcttaaatacaattacttcaaagtgtattatattttaaaggcttgtgctttctgctgtttaaaaacatcgtgaatatgataatcattctttagcctttaaaaaacagtagaccctaatgtgtgcaatttagccacagttgcagactttaatcataaattattttaaaggggcacacatatcgcagattatgtagctgaatggaccaagtttggaatgagcatctaaaaccctgtatacattttagtcattaccagactggcaaaaaaaaaaaaaaaaaaaaaaaagcttcagtgatagcctctagaatgccattgaaccattttaatgtccctctgtcaataaaaatattccaatgacaagtcacagttatcatctttagattcaatttttataaatctttgtttagcctaaaccttatatatcaagatacagcccaatccctaatgttaactaggcacaaacctaacagcatgctgtctccccaggcagaacatgtgtatcagaaaggcagaagaacattgctgcctaagaagtctctttaagtatgcaaagggaggtattatccgctttgcagttgcttgccttattaactacatttactgcaaagatgccttatgagtactaggctctggaaatcatagtcaaaataaaaacattgcctgtgaaaaggcaacatctttcacttcaaagtatttatgtaatatttaacatccttctgttgtagttcatgatttaataatagttgcataagtaatacattgatactcatttttcctcttgttctacctaaacttttgaacccacagaaagtagtttcaaccaaaacaggcccaagtttatttgctttctcagtagctgtccctgcatctttgaaatgaaatagatgtcttgatgcaagtataatcggaagtcagatcagaataatcaaatgatcaaattacttaaattagacacatactgaattgcctaaagaagaaactgctcagttgggaaaggcttacagcagacagtaaccttcaatcattttccacctctggaataaatattgagtcatattttgaaggataggtgatcttaaggatactaacaacaaagattggtacagattaactaaccattgaaagaaaaggctgattgagtttttgttcagaataaggagattcagacagagaatctaaagcattttgggcatgacaatgaaaaaatatgaaaattatataatatggattttaatactaagaatgtatatagatagtgaaaaggctaattgtatgcactgcatgtagcctagggctctcaaactctggggacctttaccgttcacattgattactgaagactgatcattagggcacaaaattcatcatcatgtttaaaataacctgttctacctaataggactatttggaccattgtttggtaattaaataccaaaatgtctaataacctgtacatggtaggtactccatttattcaacaaatatctattgcacatccactatgagctagtcatttaacaaaaaattaacaaatatttatcatatgtataaatgaactaatactttttgataattggagcaaaacaatatgcattgatctaattaacatgtaatttgaatctaaactttatgtctagatcactgaaatataagcatattttaaattcagaatgtattcatttacttattcattttttcaacaaatatttattgagtgcctattttgcatcaaccattgttctagttgtgaagagtacaacactgaacaaagcagacaaggtcactttccatgtgtaagtgtacattctagtgaagaaaacagacaattaaaaaaatcaagtatgggccaggtgcagtggttcatgcctgtaaatcccagcactttgggaggccaaggcgggcggatcgcctgaggtcaggagtttgagactagcctggtcaacatagcgaaaccctgtctctactaaaaatagaaaaattagctgggcatggtggtgggcgcctgtaattccagctacttggaggctgaggcatgagaatcgcttgaacccaggaggcggaggttacagtgcagtgagattgtgccactgcgctacagcctgggggatagagcgagactgtctcaaaaaaaaaaaaaaagtatgtaatataccatgattcagagaggaaataggtgctgtgttagatagggcactcagggtaggtttgttagaaaagtaatatttgagccatgcaagtatctgagattaggacattccaggcagagggaacagcaagtgaaaagtgctggtggcagaagcatgtggcatgttggaggagcagtaaaagtctagtgtggttggagcacggaaagagtgtataagattgatcagaaataaaatggcataggtagtcaagagccggatcacacagggcctcatgaaccacggtaaggactacaagttttattctaaggtccaggggaaggaagcctttgctagattttgagcaagggactgattctcatttacattttaaaggcattgccctagctgcagcatgaactgacttgaggaaaggcaagtagaaatgggagagcaattcagaaactctcttatttccctggtaatttatacatatggacttatcttttgctgttttttatatcctgagcatcttagtatcctaattgtggactagcctctaggtttttctataatcaaggaggagtatttttaatttgtatacatttttactaatttttctatacctttgtattccaatttatatactggtaatttttcctaacattataatgagtattttgtgatccaagtgactctgtaatctatgagtatgatacaaagttaaagtcatcacatttctttctaaatattttacatatttttaattatattctgttacttttgattagaactttacattttaaaagtacttttgccgattaggaaaaaaaatcctaaattagagaacaaactagttcatttatttaggggctagcattttatcaaggaaaacataagcttaaacttcaactcctgtgaaggggcccctagctaatacaacatttggatgaataatgaaagtatcctgcatggtttgttggcccaggtcccattgtaccttgatatgtgtgtgatgataatctatctaagcatgctccaaatctgcctgcctgataactgtcaagtctcagtagaccttatgtcagtgacaaaggtatagaacacatactattcagagacacaacaaaagttatcacccagtgattttaaattgtaatcaactataagctaacttatttaaacagaatttatgttttatgctatgtccatatatagtgtgacacttaaagatatttattttgaaaacaagataaaagataatatgtaggccaggcgcagtggctcacgcctgtaatcccagcactttgggaggccgaggcgggtggatcacgaggtcaggagattgagaccatcctggctaacacagtgaaccctggtctctactaaaaatacaaaaaattagccgggcctggtggtgggccgggcgaggtcgtgggcgcctatagtcccagctactcgagaggctgaggcaggagaatggcgagaacttgggaggcagagcttgcagtaagcggagactgcgccactgcactccagcctggatgacagagcgagacgctgtctcaaaaaaaaaagataatatgtaaaaataaaaaatattttgaatttagagtttataactgagcttgcttaaaatagaagactgacaatgtataaaatggatgactagactgggtaaagatgaatcagatctctcttacacactatatataatatatacattgaccaaacaaattacagtaattaaaatactgccaaatttcaggtaataactgataagtctaatgtttgtcaatagcttgttggtttcataaaaatgatatttcctcttagaagtaattcaaaacacccatttaaaaaaacatattatattcctgtagcatccacttactattattgaaagaaaagtctacatttgtttatgcagcttaaaaagtcttctgagatgaagccaagagcaaaaccattttgtacactcaggcttaagaataatatcaattgtttatccagctcattcttgtcttcctaccacccttgcagtctttgctgattcttctctgctggatcctttgctacgtgaatttagcaagttcctctgccttccctgacccctagcacagtgttttgcacagagtagccactccacatagaatggttgagtgaatgaatggattaatgaggattcctgtttgatttttcagcatttctttaatgtccttccaatcagtaaattattcagtgatttgtaagtgtccagggttccaactatgctctttatcattggggaatgcttccttcctggggtggatgctcctaggttctttgttccttctttatctgtagctatagtcacttaatctccaacccgttttcttcacacagtttagtgaaaaatacatagacccatgaatcttgcaatgaggaattcagcccattatcagtacctaaaaaatgcttttgagtgaatgatagatttaggttaaaatacaattctgagttacttgacttatctgggatgagaatgacactgttagggggaaatcctcagtggagaaaggatttacatgtcctcttgttagaaggcaccagggagaccacctgctgaaattctactccttttccaagttccagcttaagcatcacatcctccgtgaaagcttttttgtacccgccaggtgtaagtagttattactgctcagtgatagcaaaatacattttcatgctaacaagcccaagctctgatgactctgttttatgaatatttgttttcctccttctgttgtgatctctgttgccaaccgtaatcacaagcatcatctttgtctctgatgttcagcctagtacctggtaccaagtaggtgctcagctacacttatgtgattcaattgaattaaatgagatctatggtaaactaaaaggtatatgcctcagtggggggaaaaaaaagtggcagtaatagctgcagacctccaaacacctttgaccagaggaccttacctggggttcactctaggagggtactcacagatcctttcctttcttactttttagagcttaatatttttgagaaactcagaagcatttttatttcaaggcaaaatgttgaaatatttctacttaaagtccttcatcgcaagagtttcagaatagctcacaactatttctgaccacacagtcctctctcggagcaatcagaactcaccggcaatactgcaggaagtcagtgaggaacggctggtttgagcctgtaaactaaaatgccaccatgtgtttttgagtttaacattttagtggacaaacacataagatgaggacaaagagagagatgattcccttcatatgataaactctgcttgaaagtcgcttttacacagacacaaactcaaatagttgtttacaaagaaacattatcttggtccagtggaatgtctccatgcacatatttctttttcaaagtttgtttaaacaacttagaaataaactttcctgatcaaaatcatgcaaaaactatttaccaaggttgataatttaaacatttttaagcaaaatgtcaaaactaatatttttattttaaatgataaagtacagtgttttgaaaatattaaaagtaatataatacttgtgctctaccacctaatttgaacagatgcaaacatttagcatatttgcttttgatcttaagaaccataatattacagataaaattaaggtgttctcctaccttaatcatatttcccgtcttctctttccaggtttcaagtacagtactcctataaatatttctattatatttgtcttcattcaaatatgatatttattatagcatggtataatatgtattaaatattattttttaaagtaaatttaaagtaaattgaccccaaaatcagtaagtaaaagattgatataatcatgaagggtaaacatttggtatcagttctaattatgaagagttaataccagcatgatttcattagtactttatttttatactcaattatagcagtataatctttagcaaacatcaattgggaaataacatgttacaaaaacactaagaattaattccatgatgatttgttgcaagtgcacaaatgtcaccttattttcctacctttatatcataagatgaaaaaatctattgaaacttgtgaaattgaggatttgttgttttcatataccacctgtccttcattttatatacacacacgcacaatcacacacacttactcactgcttatctctgagctccctgagagccaagaccaaaggaaaatacaaaagatcttataactgactcgattatctaataaaaggagatgtgccatatcaccaggtaggactaccttgtgttctctgaaaataattatcatgagtgttcttacaataagataaacaaacataagccaaacaaataaaagccacctgaacaatgtagtggccaattattttcaaactagcaactttaccagaatgcaaagctgtaatttgtctgttgtttcttatctttcatggataaaatccaagggcatgatgtgaaattgcagtttcgtgggaaatctaaactgtaatgatgttcatacacatttactcctaaaagccttttgtcaagtgaaagcataacagagggccagttggtaaaacacaaacatgaagccaccccgatcactaaagtgggtgtgggaatcctggcgcttgggaatgtgcttaaacgttcaatatgataatgacagaatgcagcaagtgggaatctagtctaccacatgattcaaaagtgatttttttaagtaactttattgtattgtttttccttccaactttttattctggggttttcatgcttcctgactcaggtgtgtataaagacccatccagtcggagcgaccgcacttctctgtgatcatgaagttacccttggttattgaatatgttttccagcttaatgagcaagcacatacacatgatgctaatgaggaattttgcttcaagatacttttaaaaacgtacatgaggaagaattgtttgctttgagtattttaagatgtaaatgcagctacttctaaaaagaaagaataatcctgaggaaaaggcaatcgtgacctatgacaatggatggagaattaaatcctgcttccatctatcatatgcactgaagagggacgtgggagcaacttctgcctcgaaaggagccttgtttgctcactaacacagtgggcgttaataagtctctgctgcccctgtggttttgtttcagtcattttaaatcaaccctggaaccaggcagagtatacattaatacaaggcattattctccttcagctgtagttaagggtgcttgcatgctgtcactgttgtgatagaagcctgtttgcttctgtcccaatagtgagggcagaaaactctccctatgaggaaagaaagctttcctgagtcacacacacagctgcctccctccctgagcttggcagctcctataataagtttctagtttggaacgtagtacagatcaggaaaaaagcaggaaagagtagagcaggaaggacatggggtgacatttttgccttagtgcttcactacaatatgccttaagtagcgagccaccaagccctaatgattcttccttttcttccatatagtgaatgcctcactctggggctttccttccttgtctctatacctaacagcagtagcctgggaactagtccctctgcctgcactctactgctagcgccatctttctaaagcaccgctttcatcatgttgaccttctcatcacactgtgctcaaaaacctttcaggcctcctcattccccagaagataaaggtcactccttggactggaattgaggccctttgcaatctgtctagagcgttgtgttcagccacattggatgggaagagttcattctaatcagactgatctgtgatcctcccagcacactgtatactgtcttcctccatacatttccccaggcattctctccaccactcttcttcatctaaatcctactcttctttccagacagttcactttccacctcctcctccctatcttatgagcattaaacaaaagagtcttaaggaagtaggagcaaggcgccagacacaggggaacctcatgataatttcacccccttttctgccacttggtcttggttttacttggcaaattaattctgctgacagctttgccactgatgttttttagatcagtgtgtttaatcacctgtccctctcatctgacaccaaacacattgcatggagtatgtgccatatgaataaagccttttaaagcatgtcactgaatagtgtacattaaacaagaatattaaatttcttaaaatggaatgaataggaaagggaaaaaagatgtggctggagtcagagtagctgagatttctcaataggggatgcaaaccttctcccacagaaagagctaacttgctttaagatactgatttctgaatgcccctccagatattattgcaccaaaatttgtcacaataaatcttatatacagtaaatctggaaaatctcttagtcttagagggtgagaaagagtatctaatataactccaactcaccatgtctgcacatcagaatcacccgtagcatttttgacaacagcgactacctaggcctcacaccagacctcctaaatgagaatctctgagttgcaacccagtcatctggtttttttaagtatgccacagaagattttgatctgcatccagaatttgaaatccaggatttgaaagccagaagttaatgatggacagtatgtatttgattacaacttctcagaaactttgttaagcagttgatatgcatttagtgactacagtcttgagtcattatctccattttcacaggtgaggattctaaagcttgggaaagtgaagtagcccagtgccatccagctagtaaataagcctcattaaatagaggtctaataccaagttccaacctgtagtcacattctccatctgtctttattataattagacattatttcaatatgtggccatcagtctctttcccagcaatagttccctctcttcaaaatgtgattccgttttttggaagtcctgggaccacccagggcaagagtttcgcagctcagttttcctctgattggctatttgttgtcctagtctatttctgatcagtgaggaccagtattcccaagaccttccccatgtaatgggccaacttctatgttttgcatccttataaagagatcgatactaatggcaactaagctttttccacgtgcaagatgagcctggccaccctggaaaacctgagtgcagtcctgggtaatgtttctggagaagggcattattcattcctcctagatttcaaaactaaaaggattgcccactataagttaaaaaaaaaaaaaaaaaaagtcacctgagacctgagtaatgacatgggagacttattagccttaccagtcagttaatgcttttctaccctttgaatacagggtttaatttttcaatgcattttcacatctcttacctcattttctctcacaactcacagtcattcctgcactgcagtttccttacagataaaatacttataatcaagttccatcaaaaggagtgatgtgagagttaatgagtaaatgggcttaaagtatcataagcatcttgaatgaaaggtacacactgtttttactgttattaatataatgcagttcatccattacagatctgacagggatcacagacagcagctctgaccttatttactggccaggccagagagggtctgcgtaatggccccagagacagacaccctcaagagaaacaaaaaaaccacagttaaggtccgaaacaaccagaaagccagcctcactgcggtatagttgggtgctttgaaactaactaggaatattgtatggtcaaaatacggaatggacaccaagtcaaagaccttgggagaggaataagtgacagccatgtttaatagatgaaacaaaatctagtgaaattagagggcagccacaaaccagacacatgaatatgtaatttgctagctgccaggttctgcattctcacactctggcagatgacaaggcacttctaaatacacagagaagcttatttaactcattgcagatcatccttggaagagccatttcaagtgaggcagggaattaaattaatgtcaaaccccccgaaaatattgatgagatagttacaaatgtatgtgagttgtctcaaatgctaccttttactgctataatttaagttccttactccatcaagtggtctttaaaaattatttcctatttctcttctatcttataattcagagagctaaggttttcagtcaatgttaattttctttgaaggattttcagagggtagtattaccacatacagacccctgaaattattattttcgagtaaggctgattctttttctttgtagcctagaagaaaagagatctatgtaatcgcagtgtcaaaatgtcaaaagactgagataggttgaaaaaacgaagaagaaaagaaaagaaaacacaaaaaaccttaaaggcattcgtgcagtcctcagccttacaaatctttggctcacataaaatacttgtgacatgctataattaactagttactcctctcagaatgaataataatgcaattatttgccaaaagcagtgaagggatagtttctgttttcaaaaacgtgtgcttttcatttctgcagaaagaaaaacccttgattaatttacataagttggtaaagtgacctgcagtttcaccattacattatatgataattgctaccttttttctttttcttttttaatcttcaaaacgtatttttaattatttatttagagacggggtctcactattttgcccaggttgctctcaaattcctgacctcaagtgatctttctgcctcagcctcctgagtggctgggactacaggcatacaccactgaacctggctcttctgtcacctttttatcagagccttatgtttttcagtggtttaatgtagcaataaactgacaagttgctatcatgttcaaattatattggtgcctgaaactgtacccaaataccacaaatgagaagtagtagcctgcctggtgaaaacattttcttgccccagttggactttgatgccatcaagattactaactgtttgtttcctgtttcctttgtctgtggaaacacaaataaaaggaggacagtgagccttagttcttcaggaaccccctctcctttggagaccccacatctgccaagtagcacaaagttatctctcctaggtgttaatatatagcacaatgaatattttcaactctttcaacaccatctgccattctcagtaatttattcaacaaccatttattgaagatgtttgtaatgcactgtactaggtaccaggatgtcaaaggtaagtaaaacaccttgcccttgagaaggttgcagaaaagtagaggtataaacaagtaaacaggtgcattaccaatgcagtaaatgcaccatggaggtgagtgtgagccccccccacacacacacacacacaaattttttcactcatataaacacacaaaaccacctctaccccatgaatgtaaacttccccaaattcctctttgaaagttttgaagcagacacctggaaaaaaattaatgctaaaactctctaattttgtaatttcagtagagttcattgagctatacatttgtgtgtttgtgtgtatgtgtatttgcgtgtaaatattagttttcatgtggatctttatatagcattttatttaaggataaaatattttgagcaactgatgctttagatagtcaggttaatctaatgcccataaaattagttactaattctaaaaccaggttttaatttgcaatgtcttaaaactaacattcactgatatatcccagtgatgcacaaaaagtctggattgcttgtttgagaagacaaggaccaagagtcaatatgatttaaattcataaaatcatgacatattccaagagtagacatagccttggttttcaaatcctatttactcaaaggattcctttaatcagagagtgataggaatttgggtctgtgataggagtttgggtctgtctttctttgtactttcagtatgtagaacagggcaggctctgacatcagactgcctaaatttgaatttaggctcttcgattttcaagctgtgagacttctccaagtctcaattttcttatctgtaagatgggcatagtaatagtaacttttagaatagcaacctttctttaagaatgtaaaattgttagtgtattcattcatttcatttagctatccaacatgtagttattgaaagtttcatgtgtgcaagatattgggcgggttggggattgcaaagataattcaatcactgcaaatagagatcaagatggacttagagtttcagaccatggtcttggaatcctgcatgtttttctaactgaataagcttaatagacatatatacatggaatatagtaaataatgattatgtaatcagagtttattggtcttttggaaacatagaaatggtaggtccttggtaatccagtcacaacatttccttttccccaagcttcatcgtttttgtgttttgttttgttttgtttttgaaacagagtcccactctgttgcccaggctggagtgtagtggtgggatctcagctcaccgcaacctccgcctcccccgttcaagtgattctcctgcctcagcctcctgagtagctgggattacaggtgcccaacagcacatctgactactttttgtatttttagtagagtcagcctttcaccgtgtcggccaggctggtctccaactgctgaactcaggtgatccgcccaccttggcctcccagggtgctgggattacaggcatgagtcaccacgcccggccagcttattgttttcaagccattttagcaaatctttgaagtttcttccacttattcacaaaaaaaaaaaaaatattctccatagatttccaatttccagtgattgctgagagtcacaggaagtatttttaaaatgtactcttgcatttatttaatatatgcaagtatatagagtagggagcaaagatggaagttaatgatgaggatatgcaattgagaaaaagaccaatataatccatgcattcctgaagcttatatcccagggaaactttcacctcaaggaatgaatctatgtcctcctcttgggctgagaataaaaacatcaaccatctatacctgtttcttagccattccatgaaaggctttatttgaggcaacaagagccaggaattttgagaggaaacaaatcttaaaaggaggccttgagcaagcgatgctaggaaaggaaagggggaaggatgtcagcagcagaaaagctgtgggaccaaaatcagattagtcaaactgaaaaataataaataaataaataaataaatacaccaattggagaatcttgtaaaatatcccacacaattgttcaatttggtgttaaagcttaagtgaatttttcagtgaaacactgattctaaccagtccaattcaatcaaattttatctttctgtctgtattagtctgttttcaccctactgataaagacatacccaagactgggcaatttacaaaagaaagaggtttaatggactcacagttccacgtgggtagggaggcctcacaatcatggcagaaggtgaaaggtgtggcagcagacaagagaagagagcttgtgcagggaaacttccctttataaaaccatcagatctcatgagacttattcactatcatgagaacagcaagggaaatacctgcccccatgattcaattatctcccaccaggtcgctcccacaacacataggaattatgggagctacaattcaagatgaaatttaggtggggacacagacaaactatatcaccatctctattccctttgcaccattttgtcatgctatcaaatgggtttctgaactgccaattactttctgtctatatatatatgtgactttttcactgaaacatttagaaatgtacactgtatatatatataatctatttacaaaacatttacaaaaacataaatattaataaaaatgtaaaatatatatatagtgtacatttctaaatttctttggacttaatttggatataccgtcaaagccctaatatcttatctaatttaccatttaggtagacaagtgacagaacatacctttctgtttttcagttgctaacaaacaactttatagaagaccttgaaggagataattcctagagtctaacacaacaacagtcagaatctaaactggtttgaaggcaaaagaaactacctttttaaaaatgcaaatgtcaacctcctcactccttttttatttaatacaatgattaaggcttggcctacaaagtcacttatccacatccgctctataagaaccagaagctctttgaacatgtaggcagctcctgatctcaggttttcagatgccaagaatcagctgaggtagcaatgtcatgttccagtagcttgtgatcacatggcaacatcaaagctaaggtaggaacaccgctcctcaatgagttaagtgtttagagatggttgccatctgttgtagctatttgttcctaaataggtaaatgtaaaaataaccaggcattcctacagcaattctcttacaaaataaataaataaataagtaagttcattagcacattttctgccagcatttttaaacagcaatctaggtaattctgacacagatggtctaaggactacactctgagatgcactggtgtgtatacaaagcctctctcaatcaacagactgatcaagcagtgattcccaggaattgagtctggtgccaggatgactacttaagaatatagaatgttagaagctaccctagatttactggagcccagaaatctgcttatgaatctgtatacttaaaagttctccaggagattctaataacacagtctgtggtattagagagagggggttgggttttagcttaacaaatctatgagtgggaccttattccacaatttactagtgtctaaccttatgtaatgtctttggtctgtaaaacagctgttgtgaggattaaataaagcaatacatgttgagagtctagcatgtagtaacctgcttgccattgtatgcctagctctcagtaaaatatacagaagtaaaaatgtatgcttcatgactttgagaaacatataatctatttacaaaaacaacataaatattaataaaaatttaaaatatgagtttatattctaaagctgtaacatggttgtacacatacaccagaaaacacacaagacacaatattcagaataataaaatagagaagtgtaaagatataggaacaatcatataaaattttcttgaaaatgtttaattcttctttaggtaacctaattctcattaaatcactgaatttttatttagattatagaaaaatattaacatcatgagtggcaatcaacttgtatttattattttattatttaaaatgagaggtagaaaaatagtagtgtatatctcggaaggggtttcataggatatgcttaaaggggcccaagacaaccctgaaattttatacagaagggttgtttatatgaatatggatatttctggggagagatctatagctttcatttttccaaagggttttgtggcccccccaaaatgttaaggaccattgaagattggtccttttagtacattttatgtgcgtccttatttatgccaaagaaatacgactcctgattgcatgccaaataatttacttgtttgctttctctgaactgtcctctgagtcagttttccacaagctttaaccattcaaatatcccaagaaaagaaggaagagtaagattcaatttaagaaaactctaaagcagagtttcatgacctcagcctattcatattctgcagatatcagcatggaaatttatgtacatgttttaaaagttccagggcagaaattaactgatgatcatttttgagtttttccttttcattttttatccattgctcagttgtttgaattattttccattagttctgtgtttcttttcttctcagttagaaaagtgaaggaacttccctggaaggatacaattcaattttgccaacttgcattttgtcaacttagcaattctttcatttgtgttttatttataatgtggtaacaacactattgatgttacatgtttttatttctctctttttttaggtgtgtgtgtaatattgactgttctcaaaccaacttcaatcccctctgcgcttctgatgggaaatcttatgataatgcatgccaaatcaaagaagcatcgtgtcagaaacaggagaaaattgaagtcatgtctttgggtcgatgtcaaggtaatgttcataccaaaattcatttcaaagaatgattttagtctttgtgcaaaaatgaaaagtgaagaaaactccttattaggcagctattccatttccaaaatgcagtgcttatttacaatggatagtagagtctactgtagcatttgtgtcgattataggattttgaggggctctcagcaaccgtccagatctgtctctatacaatggaactgtattgtcacaatgccataaacacagaagccaatattcacaagatagcagacaattttcttgcaaagggaaaaaagaaactcaaaaacatttttaaaacgaatctaagaatttattagacatccttgaaactaaaagcaaatcacttcatttttatgtattgattcagtacaaatatttaaaatgcatttttaaaagcaagaggtactagaatgttctattttctttcttgttcagaaacaagcattttcttaggttttgttactcctttgcccaatttttctcagttataattgtgaatcttcttcttctcccaaactttagaaagctctcttcattttattatttgctctcagacagaaattgacattgtaaatctgtcttagtatgatgcaggttgcttagaactacagttgtaaaaattccttaattgcaatgaagatattgttggaggaaatatataagtttgatattagatatttaggaagcagttaatcaatttttattgttaattttttaacacagataacacaactacaactactaagtctgaagatgggcattatgcaagaacagattatgcaggtacataatattttcttctacaaaatgtgagctcttctattaaaagagagtcctgggaaatggttgtttactacttattccaaagtgaagcttgcaagacttctaacatgtgctagccttctcttgcttagttcaagctttcattaggcaagagtaattttttgttgaagcaaagaagacatacggtttttgccagagttaaagcaattgtcaaaaatgtcactaagatataattagcttgtctttacagtgcaaatagtacaaataacaaaacatttatcaaattaatagcatcaatggaaatgaatgcaatttctggcaatatattatagtaaatgcaaatgttcttgtttaaattttcataaaagtcaacaatgaaaagtttgctagtctctaaaaagctagaaaggacagctacaaataataatgcaggttgtctttatttagatgcaaagttaaaaatgtatgtataggtttttttaatagtaaatttctttaacttattttgaaactaaaatgtagtttctcagacatgcaaaattataaagcattttatataaatataaatcatatttaacaattatttcactttgaagaatgtctctagctaatctaacttttctagagtgagaaataattcatgggtatacaactgaaattttaacagatacttaaattttatagaaatttgggataaaatatataaatagtatataggttgataatgatatgtgaagttttttaggcagagcttttcatttagatattaagcaatcataactagatttatggtaaatattcaatcaaaaagagttgtttcttgtcttttaaaatatatactaccatctattctttctttctgaaatttcattttctttaacatcaggataaatgtgtatgaaatttaaaaaattagttaatatagagatctgaaatctcttagaatttggaaataaaaaagatattttaaacatttatattttaaacattttccacattttatcttaatgtttttcaatatgtagatggattttttatgtgctataagacagaaattatcatggacaattatacatggaaaaacattggttctaccaatgtatagccattcccaaagcgtccaggagagaaatttacagatgttccttgaaaagaatagttcagtgatctgtaagtttggaagagctcatacaaacaaatgggtcttctacccagaacttctcacagctcttatgttcattataaaatatttaagagacatacatcttttatttatttattttactttttgttgtggagaatttcaaataaaggtaaaatacacaaatgtaggttctatagcttactgaacccacaagtactcatcattcaagcccagtaacaccaacccgtggctaacccagccctgtcctcacccctatcctttttccatactttcataatatgtggaagcaaatcctgaaaattttatcatttcattcacaaatactttagcatgcatcttgaaaaaaaatcaacaattttttaacaaagttacaatactgtaatcatacctaataaaattatgaatagttccttatagtacacagcttttaacaaaattgtttgataacacatttttgtggcatgttttgcagtattgtttccaagaatgtacattgtgatatgctgatccacagaaatattatcaaaaataataaaagataataatgaaaaataaaagtctgaggctaattgtatatattttaaattttaaatgaaaacaaatttaaattgtatatattttataaacaattattatattttgatggtattataagccactgctactaactgcaattaaaatacctttactcctattttgcaaactaattcatttggaaaaatcttcaaaaatgtagaatttatgcatatcttctttagtgaaccatccgtctttgtactcattgaaaaatcaagcctctccctgagaattttgttcctgaaacaaagaactcttcaagttgatcagtgtcaatatacaaatatatatgcatttataaagttattccaataaatatcatgagagattctactgatctctcaaagtcattcatattgcatgttaacattttgcccatttcaaagagatttgataattgaatttttattccaaaaagtatttatatatgggtttggttttttaaacagattatctctaatgttgagtgtcactgttcttaattggcattttttttttcctatcttactgctttattaggcataggaagaaaaaaatacatttttaatacatgcaaatgaaaactcttctgtcactcattgtagtccaggatcttctagtttggtgtcagatttatcctgcaaactctaaagaaaaacttttaagataaaagtaaattttaaaaatacatgtttgttgaaatccaagtataagacaggaacaaagataatgtcaattgaagcttgtaattcctagttaaacatagattgcatacgtcaagattctcaagaaattttagatatatttgtcttcattaatggtttcattagaatacaatatacaccctctttagaaatcatttaagtaatagtcatgttcctcaacatttccaagcttccaatagtatttacagtttcctgaatttgggaacacaaactgtggaaaaaattaaaaggaaccaaatagagagtctatgtgtcattgtcctcttaattactatttcatatgctaaaatctgtccaaggagggaaaacaggaactgtgtgactcgtatccctcaaactttgctgtgtgctcacagctcatttaatgtcacagccacttcccttgttagacacacattcacggactctcccacctgagggaagtaaggatctaacatactatcatttttgccttatatctagttaacactatagattaaaaacccttatttatccctctcagttttttctttgagcctactttaagagctattaatacaggaacacatgtttctgattataaaaatggagatcttccttgaaagaaagtctaaatcttaaaataaattaattgtatctcatttttaatatcagttaaaagagatcccagcaaggatcagcaggaggtgaattaccaaaacgtgcaataaatgcaaacgaagggagcaatgccttcaacaaaactaatatgtgcagtatactagagtgtggcatacttgctcagagatgtgaattccatgatcctcaaaggcacataaatgtagtcaacactaggaaaccaaagaatttgctcaatcatccctgccagtattactttctggttgcatttgatttggatctctattctgccctctctcctttaatgagacccaaggcattacagagctttgaataaagggctttggatctcttcatttcaaagcccagtgacaggatacttgtcagatgagctaaccaggccatttaatgttattctcccttcatcaatataagacttgggcttagagttaggtctgtctctacacccacagaaagattcgggaacacaaattttacaaacacacaaagctagggctttccaggcttttcattgtcttaaattgctaaaattaaactgtcctttgggaagtttttaaatagcaaatgttttacacctcttgaaatttgcaacattttctttcatatatatgtgtatatatgtgtgtgtgtgtgtccctcatgtcttctaatggaaaagaaaaatgaagttcaactatttgtttttctttatccagtatatatatgtatattttctgattgtgttgtttttctgtctaaaagtttggtcatgcttcaaaaaaaaaaaggctatattttttccagtaaaaatgtacttaattttataagttgttagatattttataaaatgaagtcagatgatattggttttaattatctagaaaataaaatgttttttattttatgacatcctacaccagttttcagagtttggagtgttttataattaaaatacatttgtatttttcttccatattttttaaattgaaattgtttaaatagaaattgaaaacataaaatcagaattgttaaagaaaatacatataccagcaacacagactattacagttactgtatttagccctaagtttctttgcaaccaatacaaaagaagaaattatggttgaatcaattcattcaacaaatatttgcagtcaccgcaatatgcaagcccctgtcctggggttttacaaaggtgaacaagtcaacataggtatctgctaaatgaaacttagatttttattgtctgataaaaaataaaaaataagttcagagacaaaagacaaagtttctctatgctaaattataaaggaactatttagcatagatctttctacaaggcatcagtgaaaaacataaaatgaataaaatcttcaacaatgatttttacaaaatacgccaagaggctctccgtatggctgggaatttttaaaatcaatttttgacaacatcctagagcatagaattaaaatatgtataactcaaggacagtgtttctatgacagactaaagtaatgactttcatttatgggtatttccaattttccaaattggaaaaaatacagaggaaatagctatgaggaggagcatgttgagcttattttcctcatggatacataggttgaacaggaacaggagtaaagttaagataaagactatgctggattatagtatgtatgtggggagaagatatttcccctggctgttcgtgaaaaatgtaagtcctggatttcatgtcctcggaggggagacagggcctccctatctctgagtctagctacaggcctgcgtcgagttcctgtgtttacttgttgaacattatactgtggcaattcattatttcttgtaatatttatttttaggaaaatttccattcctcatcttcaaacaataatttatacattaatctcaggtctgaaatgtggaagaaagaaatcagaaatagttaaacgacattctgtccatcctattagtaacatcccgtttttccacattaaaggaagctgacatctggaaagggtatctagatagtttaagtgagatgtcctaataacttgttctctgtagaagccattgcaatttacaaagccttttcatatatactgtctccttcagtcttcacaacaaacatgtgaaagagatactatatgcttttgacaggtgagatatgaggttcagggagattaaataaaaagagaatgtgatagaactaaggttaaaaccatcattgctaattccagaatccagcaagtgtgaggaccagggaagaagtgtcactatctaacaagtcccagctttgggactgactctgcaccctaagcgttaaccatttggcagttccagacccaaaaatatttcatcatgatgttacgttttgtgagatgctcaaaagagttactcaaatctatatattctaagcatcctataagtgatataatgtttgcttttaaatttttccttcttctgtttcctatttttccacatagagaagagaaagcaagaggaaagtgtttgctactgagtaatcctgcattaataaaaaaataaaaataaacagaaagtaaaaatttttagccatattgtgatatgtcatagctttactaagattcactcacattgcttcatttcttctatgtcaacccaataaagcactaagggtacaaatactagaggaaataaaattgagtctcaaagaagctaagtggctgagccggaaccggacacagtattttgacattttgactgcctacctgtgtaaatagggtgcttgcttgatttacctaatatttgccttgattatgcctcaactgtacatatttaggcatggatatcaaatgatttcatatcatatttataaaatgaattaattcagtcatgtggcaaaaacctacatttaaaatggaagctttttccatttgctcatgaacacaaggagcacttcaccagaaaccacgttttgtctgggccaataatttgatctgtaggaaataaataaatagcagcaaatgcaggcagcagcttgtagcacaaatattggtatcaacagtgaaataaataaaaatgtttgcccaggctattacagtgccaccagactagcctagaatatttaagcctaggaaatgaattaagatgtcaagattttttcaagatttctgagggaaagtgtctcattgcaagtattttcccctctgggatttacattagagtgctgcaaaattcataaagctttctatgaactctaactcacaatttttcctgctctcttgaacttctgtgctttcattgttttccccataaaatcatgtagccagtcatctgtaatattatgttatgttcatggttatagataaacatagaaatggtatttccaatacagatgaagattttccactgaagagttgccttgggccctggtagacactctggaaaactttgtatttatgcaccagttcataaacgcatcctgcatcatttatgtgcactttttcctatttgaaatgctcctttctgatacaaatcgttcaccttgcagtgttacttatctactcttctctgccataagtgtgcagcagctggtttagcggttgtaaccacaagattagagggaactgagtttaaacattggccatgctatcgtggtaatttaaccttgttaaattagttgaaggctcggtttcttgattagttgaagcctcagtttcttgatctgtttaatggagataataagtctacttccaaaggattgaagtttaaattaaaagacatcatgtaaggcattaacaagcaaattagcaagctagctattgttactttccttttggtctgaaaattgaagagaattgatttttatgggaaatagagcacattttatggaatatagtctatctgtatgatatgtgttcagagttgttatacatatattatcctttatggactcgtacaattacaagaagtttctggattatttttcctacccaagtcatctaacagcttgttgcaagagaccttggctgactttttaattcatctataaagaaatatttattgaatacttatttataagttttcagcacattaacacgtctaaatattcacaaagcaaattttctggttttcctctagtcaacataatttatgtatggtatatttagatcacataaaatataatatgatcatgagattattacaacatgaaattcaaatagaaattcagtaggaagacatagcttatgacacaactgcagaatgatgatatcatatgctttcctcaatgtaaccttcaaagtcaatcacttatactctagtccatatgtttagaggacctaaatattcattatttaaaaaaaggaatgtagtatatggaaatgtatttctgtttacataaaacattatttttcactcagaaatgttaatgttcacatgtcaataattcacacacacacacacacacacacacaccccgcaaagagatcaaaacaaatgtttttaatgaactcatagtaaagaaaagacaggtctatttagcatggaagacgaagagaaaaaagctatgtgagttcaaacatctagacaattgctagtggaatgccataattctccaccttaatttatctttttacctcaagtatatgttatttcaattcctaggaagagtaatgtaagtgcaggtagaatgtatgaagcttaaagaagagtaggatatatcccaatgctctgtataatttcaaggcacaatgttttccataaacctagtaaatagaatttaagccatttcgaacaaaaacaacacacacacacacacacacacacacacacacacactattctgagcactttgatttgctgcttttgttaaagagtctgacatgccccaaatatataagccaacattatcaagagctttaaaaatgcagttctcacatcttaatgatttgaaactatatataaacattatcaactaaaaaagtcttaaaatatctatacaacaaaatgtctcaaagaaattacatttctaaacagctatttgtttcatggttgtagtttgtttcctccagttgttcattcagaaaacacacttttacttttgaacttggatgtaatcaaaaggaaccaaacttgtggaccaaactccaggcataacaagaatgtagtaatcagtgctaaggcttgagggaagtggtggcctagtaatctaggaatagtaatgaggattaaggaggacagtactccacctctgagtcctgaagtgcaggggaggagggtagaatatacagccactttgtgagagggtggaaggggtttggtattctcagaaaaatctagtgtttcagtatgcaagaagaaaggtgagaatttcattgaagcatctgaggctagaagggaatttgccagttctggagcatagttttgggtgagctttgggaagtttttggaagttggggggcagagaaatgggcttaatcgagggccaagaaccaacaagggcagcacattgtgggtctgatgatttggtgcaagatggataactggacaggatatgccagaattatactttggatagtgactaaattcatgatcagggcaggtatggctctcagacttgtggactcagatatctaaattttcactcagaaatgttaatgttcacagacaatttacatcctctgaccagtgttttctcttcctagagttgaattgcctgagaagcccagttatactgaggttacttggtaagcctaactagagcatatattctttagatgtttagggcatcaaggcatcgagctaaaacagcctgatgcaaatgtcaacacaatagggattccactgccctcaaattaggataaataagtgtccttggctaggacctcctccccaactgtcataacttgctctaacattcttgacctgaccatccttggtctgagtttccatttctgggtggcctcccactcagtccacctgtgttctcagatatagtaaatttaatcaggataaaattgaggcctggtttcacggaagccatttcatgactttaagcctgagctcctctgggatctgtagctcagtagcccccaagaaatgaccattttagtatatatctcagtccttattggattgctatgtccttctgcaatgggaaacctgcaaatgttttttcacaaagttaactttgaaaggcattttttaacatataatttaaagtggtttggccaataacaaagaaaagtgaatattttttcctatggtagatcagcatttatgctagcaaatgctttttatggtgacgttgttaatgtttaacttaataaaacacagagtgaatgtactaattatcctgcatttctgcagagttattgatgcattatcaatgtttgatagcgttacataatgttcctgtaaaatatatttcacatgattttcaaaaaaacaaaaaacaaaaaaaacctctgccttaatctttctttcacatcttctgaggttgaaagctgtgtgtgtcatagattagaaaactccctcccaaaagtatgtctttaaaaatttcatttactaatgaaaataaatgtctgtttagctaaaaaaaaaaatagtttttaagtattcataaaatggagactaaaatcaagctccatttgtcctctagaaagtcagtattccagaaagaccatgttattagtctatagactttaaacgaacaagcgatcagtgctttgtcaggcagtacacatccaaattcacttctgcagattggctgttcgtgtaatgtcaaaattattctacaaatcttgcaccactggattttttcctatttacttttctattatttaaagagcaccagggaagttgaaggtttcctgttgtttgaaataatctctgagctatcctcacacccctagccactcactcattccctacagctggcacataggcctttgttattgatttttgatttttaatgaaatatagctatagaagcatgagaaacaaccaacaggcagaccagggaaacttatctgtaagatggttttaataaagtgtccacattgtcttctatatgtagaaaaattaagagtaagcctaacattccatcaacagtgataggcaactattaatgcttatgtgtctaagtagattgtcagtgctatattctaatattgaagctggttgttttctgcagcttaacatacttccgagctgttcatcttagccatgaattgatacgtactcaggaaacatagctaattgtaatgttatcctaagaaaaccattatcatcttcattatactcatgattatcatcatgattataatcatcaggaaaataataccactggaataggctcattttagttcattccaaaatcacctagaaattatatgtgtgttatctgttgttttggattctctacaaggctattctccaatgacatggataatcatatttttaatttcacttggattttagagccaatgacttacaaatagcattttgcagaagagcttggagtaggatgcagaacttttgacttagtcccatctctgttctaattcatctaaatttagttacttagcttctcagaacctgttttctcatcagtaacatttgaaagtaagattaaccagcctgggcaacatggtgaaatcctgtctctacaaaaagcacgaaaattagctgggtgtggtggcatgcgcctgtagtcccagctattcaggaggctaaagtgataggatagcttgagccccagagtccaaggttgcagtgagccaagatcatgccactgcactccagcctggataacagagtgagactctgtctcaaaaaaaaaaagtaaaaagaaagtaagattatgatgttgtctttccaactttcgatgtctataacaaagtatatagctttagttcagaaatcatgattgagggaaaattgttgaccatcaccttatggcagcagttctcaattttgcctctaccaaccttcctcctcctcatttccctcccacctcccattcaggggacattggcattatctggagacatttttgattgtctggggaaggggcaggggtaagtactgctggcatctagtgggtggaggccagatatacggctatacatcctacaatgcacaggacaacattatccagccagaatgtcaatcgtgttgtgtttaaaatcctgctttttggtgctagggattaggggaaagtacatattagatgaggtctagaagttaggaggtattgtggagtccagagttggcctgcctaatcattcttgaattctcccgttccccaaaaggagacaaaatcccagaatgaagatcaccagctcagtcatttcatcttgctgcttcaaacacacttttttttttttttttttttctgagacggagtctcactctgtcgcccagcctggagtgcagtgacaccatgtcagctcacggcaacctctgcttccctggttctagtgattctcctgcctcagcctcctgagtagctgggattacaggcatgcgccaccatgcctggctaatttttgtatttttagtagatacatggttttaccatgttggtcaggctggtctcaaactcctgaccttgtgatctgcccacgttggcctcccaaagtgctgggattacaggcgtgagctaccacactcggccccacttaaaaaaaaaaaaaaaagatagttgtcccaaaatagaaatgtgaggtttcacaaataagaggcaatatctgtctctacaaaggctcattagaatgatgaaaattcatctggctaaagaagttgtttttcttttagttataggttattgaggaaagtctcacagacataattggatcgcttatcttattcagtattcctaactagtatttgcataacttgggtccctgcttttcttctgttcaaagccatgtcatccttttgttcattctagctacttcttacaaattttgattaaattactgagccaaacactgactgtttgaaagattgtttaatgatgatttttaaggaggcaacagcaaccatttcaaagcttctttatatctgggcacttcctctttatacatttttgtaagccttggctcatagaaatatatttaaaaacaactggctaaattctattaaaacactcaatggcaatttttaaaactgttgcgttgctcatggaacaaaatgtttggcatgccattaaaactgaagtgttcatgaaaactttcatagctcaaggagacggggaacctgaagaggttcttaaatggcaacttagtacccagatacactgtgtcacattcttctgggaaggacaggaatgtgcaatactgttaggtggctccaagtaacagaccctccttggaacaggaatagacctgattgtattggtgtgctgtcttacctactgaaataaagttattggtcttgcaacaaggacagtgaggatatttgtttaaaaagacagcttgaaaaaatagcaaagacaacaggaaatgataaacgagcaagactttgccacaataattactgtagtattgaaacaaatgaataactttcacagcaatgttattttctgtcttagattacactactacctattcatacagtatgtgcaccattgctcttttactgggaaaaatatctaagaaggaggagttggttaataagttgtctgataaatttgtgttaatgtttcagaaaacttacaatgtcttgtgaaaacagactatctctgaaagatggaacagttgttttgttttttatcttcactagttttatgctaaaagtcattaaaagaaaaactgaggtaaatccctctgatacagactggtgaaataatatacaattatttataacctattttgtgaatgttattccatatgtgatttgttagttcctactgaaatgttttggttttgtgaaaaatacttgggacaaattatcaaaaaaactaaattctatacctagctcctaaatttataaatgttatataacttctctgagaatctgtaaaatattgtatctacatctcttttttttcctttttcctatgtttcagatattaaagccctttgtgagatataactcactatggaattgtaagagattattattgacaaagatttaggatatggatatgcctcattctaagtgtttttcatattgtcatcaaattcatattttctagatagaagtaattgtttcatttggatagcataatttgatctaatcttaacaaaattcagactgaagatttttaaattctacatttttattttcccatttttgtgtatcagtatattaactgggtaatatttttaaaaattagatgataaggatgatggactcttttttgatatatgttaatatatatataaagcttcaaatttatgctccacgtagttctgttccccactgattggcttaaatctcattcaaactccatttcccaaaaggataagggctctttggagcaactgttcatattattacaatgagtttttttcccctcccctaatgggtttctaactaatggacgagtttattgggctcaacatgtttgtttagaatgtttcagaatgtgtgcacaaagtatactatgttagtctaagatgatattatttagccttagaaaagaaatctattatataatttgaatgtaatagtaatgcccattaaatttatgagtttaaaatgttaagagcatgttaccccatcgttcctacatttcattccctcatttcagggatttcattggagatttttttctcaatgaatnnnnnnnnnnnnnnnnnnnnctcaatgaatagaaacataaacttttctagtatcatcaaaggaaggattttacgttgtagctcttgttctctctctgggtaaacagaaagtaaggaagtcaccaatgtagttactggggttcaggaagattaaattctaacccctcccatcatatatatgagactttatcctgtttttaaatttatttggagaaacttagattaactttggaaaaacagattttctaagttttcttgatcacctaatccaatagctaatatcccttgtataaaaaggaaattcatttttttaattaacaaaattttttcactggacttgatttccaacagtgccctttattactttaaaaagaaaaataaaagaaaaaaagaacttacgaagtttacctccatagcttatattacctttaattaacataatattttcagcagatggactactagggtttagcagaatacatacaaactattattcgactttggattacattttgagccttgaaatagcatagttcattcattgctgtatgtgacattttaaaaagctgaacaaacaatattattcttggaaaagaaaagttctttctcactggattcaccatttagaaacgatattgaattgatttgaatcagaaaattgtctctaaaaacttgaaatgaatataaacattaggcagatgatctcacctcttatttcctgctttagtcctgttctgtttcctttgagtggttcttaatattcattcaaacattgtatgtgttcagatgtatcccagagccacagtttgctgtcacttttgtcagagcccaggtttactgggctctgtacttcagagctgtgcaaggctcctatgccctggggtagacccctcttaataagaggcatgttataatcattctaccaggcactgtcatcttatatatcaagagcacttgcatattttaccactatttcttcacctgtagaaagcatatggtgcttttaggtgactaaagttctcctgccttagccttcaggcaaaattcttacattccttggagtaacaaaggttcatatccctttttgccccaggagaaaaaaaaaaaaaaggctaagatgcatcattaatcatggaaactgtctactgcaacagtgccaagaaaatgatcatccttgtactacccatcaatattcctgacacctgtctaaaaactcaggtcatgcatatccatctgcctttagagaagtgtcaatgtgcaaacatccttccactatttttagggtcatgttaaaattattcaccacctgcctgtcagttcatccaatttgtaatattatcctgatctaccattgtctattattggtcattcctcttttgcattgtgtttttaaagcattagagtgtaggatgtttttgaaactgtcaaataggagacagtagaatcctactggaggccagagttcccaccaataaattgctacactcggtgtcccctcatgcttcatagaatatgcagacatttcggactcccatttctactgcaagctccacctcaatcttatttctggtaaatgaattattgtttctaatgacttttattataaaatccaccatatttctatcttgggaaattgttctaagaggttaaaacacaccttacaaataaacaaaacttttaaaattaaggagtcaaagaagagctgttctgataaaactgtacatactcaaatgcctagtaatattatattacattcaaaatttaaaatgaaatggaaattttgatagaaaaatatgatgtagcatgagaaactcaagcaatatcttggtatgtctcatctattattcttagtataaaactcataacttctaaaactagctagtcagtcaaattgttcactggtgtcaagtcactttttaacatttgtattttacatctaatgtaattttgaaactagtgtaactttctccatgctctttgacttttttttttttttttgcctgttttcattgtcttgtgctaacacctgtgaaacaggttataatatcttagaagtgaggcatttccatgtagatgggaaaatctcagaactgagatttaatgcacccttggttctagttgttgctatacactaatcctcaggaggaagacctgtattaggtattacatttgaccataacctccgtgagtctttgttttcttatctgtaaattacagatcttagatagataatctctaatgtctgtttcatataatagcctacctttctattaatttgtacaataatgacacataaagccatggactgaagtgctcagtccttggtaaataatgacttttcccagaatttgcataaatatggatatggtagaatcctgaaaatgggtagcaaattcagagtgtctcttcagaattgttgttgctgtagtcaacgttgctggcccaaaccatcaaaatgataaattgtaagcctagaaaagtaccagtgattttcagacagtatcaagtgacttgagtttaactgtgacattcataaagtcacgtgtcctggttcttaggcttgctggtatccaggacttcaaagcggcagatataacaaagcaacctaagacctacgaaatctattcatgtggaagatgaaggggcttagggagcttatgatttaattagctagttgggatcagaattttaattagtaatttccttatgaggattgataaatgtattaccgatgctggtaatatttgttatgactttttggaaataaggaaattcaggggcaaactgcacccaagcttctctaactttatattcagaaacccatgttactcaaacaaatacacatatgccaaattataattattcaaataacttttatggcaaatagaaaataaagcattaagaatgctaaagtagaaataatagaaacacatttaattttgcatttactttgtgtcatgcattatatatacaacacgctatctcatctcttcacaacctgcctggggatcaggtataatgaggaaagcatagctcagaaatgttgatgcaatagaacagggattccagctgatgtgtgtaactataactggcaacaagggaagtcaagagtgtttcagaaaatggtagtgtttgcattgagtgtgcctggcagagaagagaaaaaaatgttatagacatagggaacaacatttaaaaggcaaagaggcttcagtgagtgggaatgcccagggaatgacaaatagtttcatggctaaagcatggaatgaaaaagtggagcaactggagctaagtgagagtagtagtttgttgcttcaattaagtctctttcctcatttgcaatagaagttaaaatttatcttctgctcaataggggagtcactaaggtattttaaatcatgtcgtattttttattaaataaaaaaaaaaaccctggcagcagagtgaagaacaggctagagagggagggcattaggcaagattaattagaagactacggtcataacaatgaagaatgagtgttgtggatgatggtagcaacagagagaaatacatannnnnnnnnnnnnnnnnnnnnnnnnnnnnnnnnnnnnnnnnnnnnnnnnnnnnnnnnnnnnnnnnnnnnnnnnnnnnnnaaaaggttaccagatttgctaactgaccaggcaaagagaagtggaaagtcaggaaaaatacgaaggttcctggttcatctggctgcctagatgaatgacagttccattccctaagatagatagggaaaaaagtatcaggaagagtaggactcggggccaaataatgaatatgttcatttctatgttgatgtcttcatcaacatagatgactggaggtctggagagaagagggcatggaaatgattatgtggtaaccctcaagtagaggcagacgctgggggtggcagtgaattcaagtggaggaaaaagcaaagatgaccaaataaatacctgggtaaccatgggacaaataacaagaagccctggaagcagatggaaattgtgaaaacactcattagcttctttctcctttgttttcttcctttcttcttgcttcatgtttttctttaatgccagatgaataatgatttcactgtgagagttgtattttaaaatgttgttcctgttgcaacacttatttttctgtacactggggcctaacacaatatgccctggttgttttctgtgctcacaaagatgtgcttcctcatcgtctcctggcctgcccttcacaccttccagggtagggctgctgggccactctctttcctgtccatgtcactccatgcattctctctgccaatagtgtattatttccttcactgtgtttaatgtgagcagatttatttatgtatttatgcttttacctttttattttatgtcatcttttctcataatagaaactccatgagggcagggaatttgtcttgctcctccctgtaaatgcagtgcctaaaagaatgcctgacaaatagtagactctcagtaattatttgttgagtaaacgaataagactgagagctacctctctagaaaccaaactacataaaattttaaaggaagctccataccaaattaatatctctttgctttcttctcaagaaattctaaccatactaatattatttaaccaacttataatgcaaagccacatacaggtgctaaaacatatagatagatagatagatcgatagatagatagagatatatatagatatatattaatcataaattaaaaattttcactcctgacaaaatggatcctagttagagggtttaattttttttttttatctctactgggcatttaaaaaacattttaaggaagaacttgtatagaaaatataattccaaacattgctttggaagtaatagcacagcctgtttactgagaggggaaaaaagagaccttcatatgcaaatgtatggcatttgaaaatgtcatatagctacatctacatataaataagctgctctctgaattccagggaaggggagagtttgtatagcattagccaatttctctatcaaagtaaagtaaactaatagaatagcagtgactcaagatatagaaaagcacatctttactacctcttaatacagttgtggcactccaggtcaaagaccacctggccaaaatccaaacctaaatgaaatcaaatcccacagtgtttgaatggcaatagaaatgaatcagctggaagaaaagggattcacagatcaaaaaactgagaacttcctatcaagtatttgcttcctttctaaacagtgacatgaaaaccaaaggcttcgtgaggtctcctacacttagcctctatgccagaattgtttttcaggtggggtcctaaaggttaagccaaaagaagaaaagatttaatttttacctctttcctatttcatatttgtttcattgcccatatacaagacggtcactttgggaacatttctccggtaaatcctaatatgtaaactaccatatagggataaataactccttgtattaaatgaatttttcctccagaagaccagagtaccattcaattaaactatatttttcctacattgtatggttctcccagctcctggaggagttaattggcctcacttgaataggcagcccattcctggagacgaggtgccctggtattatttttacaataggccatttgctgctttccaagttgaggctacggaattcaccataagaagaaaaaaatcttaataaattattttatgtaatttttactgaccatttcatgcagtccatgtgggagttatgtttccctaccaggaagagctgactgcaatctaccaggggtgcctgcaccacaatttcattttaggtgctaaaaagcataccaaagcctgccctggcccttatatagcatatttataagggagctcaggctgagaaaataagcttctagaatgataactgaagggcaatacttgtattttagagaaaaagacattttagtaagcttaaggtatcaatggggaagaaaaaggaaaattcaatagtcaaaggaaagcaagaaatcagggtggtcttcagatagatcaatataattgcttttttttttttaatagggctgaatgcttggcaattttattagtgcttctctttgaaatgacttttcaatgaaagaattattatcaccattacaaagataaagaaatttaggctcagaaagattaagcaatttttccaaggccacccacctatttaagaagctgagagtatgtataaactgagatccctttgaccacaaagctggccgatcgctttccattataccggcctgcctctcgataaattgagtaacagggaaaaggtagcaagatgcatactggctacatccgaaactatacagtctcttgtggcagatattaaaggaacccaaacaaatccctaatgaggattaaaaatatcgtatcaaaagaacatgttcaggaaactaaaaaaggaaaaaagaagtagagaaaattttgttgagtttctgctaaaagtgctgacatgtggggatatttatgtttttctgaacatctggtggatattagtatgtttttattcacaatcttctgttattaatgataaaagctgagtaattatgatatactgccacaatgaatgaataccatgcattttttccagtgtattacagaatctcatcattccatcaaaaataaaaacatagttatttttgaaaagaggaatatggatattatcttattataacaaacttgtttccatcagaatagatcacattgagtcagcaactctgtttctaagagatgagatacacttcaagtcataagatttgttgttattaataagtaattcaaattacaattttaatattgcctttagtttgagaaatgacctaaacctaatatatatttattttgtcaagacaaaaaatccatttctaagatttcatggaaggagagattattttattagcaatagacacaccatggcttttgtttcctttgtaaattgtcaaaatgaagtgtatctttactgaccctgtaatcttctccctggcttctgtctagagctccttcaactatgcaagcctttaaaaaaaattcattactgaatacaattgactgtcttccacaaaatgccagcaatgacacacgctcagaggctaaaacaagcctggcagtgggactgcccataggtgagagcatagcaggtgatggttagtgggtgccgcctttgcagcgggactgtacaatagctcctatggcatggaccacactcctcaatccatgccctctagcctgctccaggcacaactagttcccccacaagccatgctctctctcccgtctaagttttttgtgtctattggtccagcatggaatactcttctgcttttgtctttggctaattcatgttcatatttcatgtatcggcttcagatagccttcctctgagaatgaaaataatataacagccactttcatttattgagcacttactatgtgccaggaacttggctaaacaaagacttcacatttaaaactcttttactcatgacacacattagtttaaaatagctatagtttattgagtacttactgtgtgccagacaggcataaaggttaataagttgcccgtggtcacagataggaaaaaaggaaaacaaacgaaaataggatttgaaccaagacattcaaactcccaagcctgtgatcttattacttcataagtgtgtataggtatctgttatttcacccgttttaaatggaggtcttcactccccaccttccacccggagtctgggcctaagtcctgttgtgtccaacatgggcctcctatctcttcccagtcatcacattgcattgtatttgcctgtttgcttttcagactctttctttctagataaggaaacaaaagccttgaggaatgaaggaaattgccaaaagaccattaacaataataaatgactaagccctctgttccacagtctgcacttttctttctgcggaatgacccttgtaattgtaagccagggcatttctccacagatggatatcccataaaaacaaagccaaagtgacctgaaaggcacagagaaaatgtatgtctatgtccatttcttccttctcaatggttcctttttattcgtttgaaaataagagtgtgaagatgtgattctaatgactaataacaactaaaacatttattaagtgctgattatttgccagctcttttgctgagggttttatatggatcctctcatgtattcctcataataaacctgtaaggcaaatactatgattatccccatttcacagataaggaaatatctacagaggagtatttgacttgatttgggccccataactaataggcagaggcactggcttttaaactcaatttgacacaattactctttatttgtataagaagtgagattattttcagtattgcaaaaattcactgtcaattaccaaactatttgacttagataacatatcaattatgtgttgtgagacaaacagcaaacataccttatgttcagaatcctttagaaaacactgagaaatatttagagaataagagagaaatgaatatgcctaaagctctccatgctcatattttgctcctggtttctttggaatgtcctagcttgaagagatgataaagggcttgtatgggtccaattctgtgttgtagaaaggcagatgggatcctgaggctctgtaaaactgttcctctgctaggcatacttcatattctctatattaaactcatctttaattggcatggaagattcattgttccaaatctcagatgaagatccctatattggatgcaattaagcctggcagcgccctcaaaagacagtcttgtcactgctagccacagccaggacacagtaacagttccttctagtgacccaagaccaataaaaaaataaaaatactaaagaagttctgacctccaaaggcaattagcccattcctggtattgccaattatgatagaaaaaaattgccaagctcctgggacatggaaatacactcagtaacatttgagaactggagaaactattttccaaaatagtatgaagacatgaaggtgatttgtagatatttgagtttggagaaagttgagggaaatcagattacacatgtttactacaagagattgttaataagtaaagaaaggctctgatataacaaatctaaacagacgaagtgagaataaaatcttaaattcaaaaacttgaccatccctttttaggcaaaaaaaaaaaaaaagaagaagaaaaagaaaaaaatcacctgatgaccttcatttttcaattattagagttatctctactacctagaaataatcactgtcaaattttggtgaatttccttctagttttttatatttcctatatatttttttaattagcatccttctcattttctatgtcatcaaaattcttcatgatttttttctatttaaataacattttatcattttgttgtaacattatttaaccattacactgttgtggaaaatttaggtaatttcccattttttaccattttggatgatgttataattaattaatctctttgtaacctgagtctttgtgcttgaggctcttgatatatgagctactacattcctctttgaaagtctctaccatattctttccaattgatggtatcttaaattttctctgcaccattaaccactggccaactaacataataannnnnnnnnnnnnnnnnnnnnnnnnnnnnnnnnnnnnnnnnnnnnnnnnnnnnnnnnnnnnnnnnnnnnnnnnnnnaacttccctgatattttagagcagcttttatagacatggctggaaattaagcttacaattaaaaaaaataaagaaacataaaaaagaatgccatttgcataaactaagcaaacagatccaaaatatatacatagtaaaaagaccagatgtaaataaataaaattttgattttggccttctttaggttgtgaactttcagtacttttgttcttttcctatctatattttctactattctcaaatcaatgtgaattgcttttatagcaaaaaagccaatatactttatttttaagaaaaagatatatagaaccaagcaatttagtcctccaaaaaaaaaccacattcttcatattgaatgatatacagtatcctattacagtagtatgcgaaacacctatagttatgactgtacctacagactcaactgaaagaagaaggcaatcataggaatctctccaggccacacacacacacaaaaaaaattctgtctcaattatctatagctttcacacaaaattgttttctgatctggaattatccagatgactgactctttcatttttcttctaactctacatgtaaaactctaagacaattatttaccactgaaaaattgtgaagaaaacaccagattaaaaatgagaacacacagaaaaattgggcatgagtatgtaataattctccgtactttctgggtattagtccattctcattctgctaataagacatatccaagattggataatttataaaggaaaggggtttaattgactcacagatctgagcgctggggaggcctcaggaaacttacaatcatggtggaagggaaagtagacacatccttcttcacatggtgacagcaaggagaagtgcagagtgaaggtggggaaaaacaccttataaaaccatcagatcttttgaaaactcactaactatcatgagaacagcatagaggtaactgcccccatgattcaattacctcccaccggatccctcctgtgacatgtggggattatgggaactacagttcaaaatgagatttgagtggggacactgccaaaccatgtcactatctttgttaacttttctctaaacctaaatctattttaaagtagatttttaggagacacacatggctttggagttctctgcctttagccctctcatgacattagagattcactgaatatttctgacctcaagctcctactttatcaaagaaaaaaccgtatctatacacaaacacataaatatatatgtatgcatgtataggtatatatatgcatatgtgtatatatgcatgtgcgtgtatgtgtatatacacacacatatatataaatatgtattcatgttcttaaacttacatacctgttaggagtgttgcagtctcaaacaaaataagagctacaaaaacaaaattttaagtcactatatgattataaaataataatattatttaataatcttttggcaagtagaaaacctacgttatataatggacattgaagagaccaaatctatgaactttttatcttaaaagaactcttattttcttgtgataaatttttcaaaaagaaagcaaagttttgcttaaaagcatttctcactgatgtttctgcatagtctaattttttcctttcacttcatgatttacttatcttgcctttaaatttacatccccaaattcttcgtagacaattacaaatgtccttcctcctactttagatatcacgtagctgtaagttttcatttcttaatcatacattatcttactattatttagtagctagttcaccccttaataattttccactgaactacggattctttccagttaacatcaattctactgtagacatacccaaatataaacatagaattttcaatgtaatctcaaaaatcctaataagggatatctgtcatgtttatacattggagcttaaatgtttcttctaatttttcccattgtacaaaatagcactaccaagatgttttagccaaaaactgcatcatcttggaatagttcctaccattttgcaatacataaacaggtcatattcaatccacctgtaaggtacaagggaaataaaagtaattttttcccttcttccattgctactacccaagttgaagactgggacattgtctttctcccacaccactgtactggtctcctgtttgctctccctgcttcctctgtgtccccttaatgatccatttttagtaacagacagatgtgctggaaactacccaaatgctttcccattgatctttaaactaggtcaggcacagtggttcatgcctgtaatcccaaccctttgggaggccgaggtgggcagatcacctgaggtcaggagttcaagaccagcatggacaacatggtgaaactccatctctacaaaaatccaaaaaaaaaaaaaaaaaaaaaaaaaaagctgggcatgatggtgggtgcctgtaatcccagctattcgggaggctgaggcaggagaatcacttgaatccgggaggcggaggttgcagtgagccaagattgcaccactgcactccagcctgggcaacagagtgagactcggtctaaaaaaaaaaaaaacaaaaaaacactaacgcaatacttcttagcttggtgtatagtaaggatcttactgacctctccaacttcattttatccctctctccaccatagctggcacattctccattctagccacaaggctgtttcctggaacacctctttcctgcatttgtctttctctctgtgttcactcagtcagaagctcttccggggctatctctgaccagctctttctcatccttcctttcctcaatatgacttttatcacctctctagtatcccacgctactattctgtatctgagcaccctattttttcctgtgacatttctaatttagatgttgatttttgtttttatctattgcctatctcactctctaatatgcatgctcttccagagagaaactgtctatttaactcaccactgtacatactatacctgtagtatttaacacatagaaggaaaccatcaatattttaaatgaatgaatattattgatgaattaattaggtgtgagtaggatcaagctctagtaaatttagaaacctcatgagagaaaacatgtttgttaccttctctggatccagggggctatatagtcacacatcaagaaacaaaagttgtgggttgctattgacaacatcaatcaaagcaaaagtgaggggctctgtttgatttatcaatgtcatatttcgctcccaactctgaacatacctattttgtgctttttctatttcaaaataaatggctccctataagcccaattctaaatgttagccattttacttctaggaacaagatagaagtttgactctctccaaattcaaatttgtacatgttttataacccctattgatttcttgagtggttaaccatgtacttagaaaggagtgtaattatatacctggagggtgttaaacctgttaaaaggtaaactaacactataagatcacaaggtaccatttagttaataactaatctccagccctaaatgatgtccatgtagaagtaaactgtttagactcacattggatccttaactgtttctaaagtagttttttgcactccagttatcactgactagaaattaaggaagtgccagaagcaagtcagttgttcaaaactgggaagaaaaaaaaatgaatcttagctacacatcagctcttaaaaacataattttggggatgcaaatgcaatgaatcacgggtacttcaacttaagcttaagctaaggtgatcatacaattcatcattcaaagtaggaaacttttgagagtaaaacagtacacgattaataatttatgctgggaaaatagacataaataaaggaagactttccaggtcacatcctagccgaaaccaatctttcagctcactttcattgactccatttggactattaaaagatacactctatcaatatgagtttgattggtaaatggttaccaaccatgtacaaaccctactttttctagggctgccataacaaaattaccatgaatgaggagacttaaaactacagaaatttattatctcacatttctagaggctaaaagactgaaattcaggcattagaaaggccacactttctctcaagtttcaaaaggagaatttttcctgggctgttccagcttttggtggctcctgcatgttttggttttagtggcacatctccaatgtctgctgccattttcatatgaccttctgcttgtgcgtcttcccttgcccttcctcttgaggacaccagtcatggatttgggacccaccctcatccagtatgacctcattttaagtaattacttatttccaaataagattacattctgaggttccaggtgaatgtgaatttggggtaaacatggatctaccaaagacagtaaccaataaactattggttccattattttaccaatcactagatataatattttgctgatagaaaaaaaaagtaatgctgggcatgaaaaaaacttgctcattggtattactgtgtctctttaacaggttaaatagagggacaacacggaaatctaccatggatcttcacatcttaaaagttttattttaggcagcattatcacattcaatgacagtcttactgtgcttaaacacaaagatatttgattcactgacatgtaccaatagatgattgagaaataccaaaagttgttaaattcttcagggcttatactggctttggaagttattttttagcaaaacctataaaattctgtgattttcttagagtgattccatgacttttttattgccagttttatttagaatgctcatttaacatgtcaaacccaccttcagaaatactcatagcacaatcagctacatttgtttctttaaataattttatcttattcctgactatgagaagagatggtatgccttctggctctttcaatgagaattgcttacactaatttggtcaggtactgtcaaatggcagtactccagatttataaattaattcagatctacacaataaattctctcattgccatttctgggccatgacatcattcaggagacatacacaaacccatcaacatttgcttatgcttgacctttcacaccattcatggatatccttcttgtctttcatgattagcaacacatttttgctctgcatatttttaccttttgctgaaggagactgaaatacataggaaatatggctcttacctatgcacctagtctttttgtactggaatgtatactttctattgagtagacttctctgccatattgcaccttaccttgtcacctaaggtagggattgattgtacctttatggacatttcactgaagtggtgatgagctggctctgatgcaaacaaccaggggcattaattttttcaaagccaccacactgaggtagaagtagctgccaaacatatctcctatgcctataatattcatttatttattcattctatatattgaacactttgtgtcagtctctgtcctaaacgttagctctctctctctatatatatatacacacacacacacatagatacacacacacatacacaaacatacatacatatatacacaaacatatatatatatataaacctggaaacaatacacagtctctgcccaaagagagggtataatctagtgcaaaactttcttatgtgccctgaataggtaacaggtgtgttagtgcagtgatccaccttagccttctgggtggcttgggtggctagagccccaaggcttataatgtcctctttttaccaaaaactcaatttatttttttctgtatgtatggtgatgttaaaaatttggagatgccataatctaatgcagtgtttcccagaatgaagtctgatggaatagtcccacaaaatgttcctccaaagagcagggaggttccattgagaaatgagtctagaagcactacataatgcttgtcccctcctggcatctcacagtgtaagttagccttttaagggctctgaggaaagcagcagtaaagaaaccaatataatttggtttaatccactctatcccaaatttatttgactacagaacccctttttcccgtgaattctgctacagaagtagtcaggcatcaacagagctcccctcaggaaactctggtctaaagagcatgttctatgtccgtaaggcctgcaatttagaagcacaggtggccatttgtcctgccccatgaaaccaaagagatatttctcaacttctgcctcttctattctgctgtcaatacccactctttgttttaatatcatttatctcagttgccacagtgacacaaatagtaattttgcctccaattgttttcctctatttgtcttctttcctgccgctgttacctttcttgtgacttcatctttcccacggactagctgagctgatatagatatcaccagtggcccaatgctcctttactctcatctgtaaattgaagcaatcataaacattggtataatctgcaccttttctcagctgtgttatctgttcctgtatttgcaaggatgcttcatttgctttcacacagggtgttcttgttgtcaattctgttagttatacaacagagtcattaaagaagcctggagatttgaaaaaattggtctccaaatatctgagaattgacaaaatctagaaatctctcacagatgttggcacttgttacaggcacacaggccatacatggagtggagtgttctcaaaagagacaaagacattctaaaacagagtgagttttccaggctgactacgaagggtaaggaaggcttggcaagctgaggtcccctgaggacttcccgtaacatccaagagtggatgcgggaagagcagcagagggcaaaccatggctcacacactcatagaccacagcggagactggcactttacagagaggagctaagatagacctgggaccagaaaggtgggccactgtaggacagttatcaggggaaggaagggggatccagggtgcaggaaagcctagcatcagatagccaaagcctgcgagaggtaagaaaaaatggtgacgtgaggtcaggaacaccaggctgcacactatttgcacgtcagaatcacctaaagcaccttttaaaagacagatccaggcccctcagctggtaattctgattgagctgatcaagaccaaagcctggaaatctatttttcacaagggaaggaggtcaatctgcactagaacaagaagcattgcccttaaaatgggaattttagtgtactataattctattttatccttaaaattagctatttgtaagagatcatagtagaattgtgtttatacaaaactcacagatatatatatatctatatacatacttctgtgaggggtgtcagagcatcaacagcatcctctaagatcctgtgatgtccaaatacagtactaaggtgctgtacctataatacctataaattctgctcaggtatctagcattgcataatatccccaactgtggctatctacaatttctaaactgggtagttcattagtgtttagaattaaacattaaacttaaatattccatttaaataatacaaaacatttctagctattagaagcacttttactaccaattttatggaacttttcagtttcctttttttttttctcagaagttcagttttaaaccagttttcatcgagaattttacatttcttctagtgtcttttctcaagcacttttgagactgtgctcaagaaagcctattgaagagtaaaagctatacctctgttccttagtttaataaattataaaaacccctccagttctttttaggatgctcttgtagaaaaccaaactgatcactagttttatttatcacagtatcatcaagtatatctgtgctgctaattgtggtgtttagcatctattaccataaaatacttttaagtatgagaataaatgcatggttttattctgaagctgacaagtaaggaaaatgttttattaatttaaaatactagtttctattttgaaattcatttgcctgttttttgttttgttttgcttttttaaataaaagtttccttctgccctgaaaattttcaatattctcacttctggacaatgctatacacacagtgtgaatggccaaattagaatctgttaattcagaattgaccatacatagttccactgtgatttttgaggtatgacatgcatacaaatgacaaatttttccacctagaactaaagttcccatacttcaatctttaaatgaaaggggtaataaattcttcctttcaggatcacacacatccctggctaacagaagtgatattatttttaaaactcgatgatctgttcatttctccattagcctcaccagaagctgtggaaagaagaaaccacatccccttctctggctccacttctccaggatctgcagccactcccctctggcagatattctttcataaggcagtacttacagtcccctttgacatgccaccctcacctacaaaaagttgttcccatgaagcaaagttaagattccttttctactgcttttacttttgtatattttctggaaacttcccaatatcagtagagaaacctagggaaacattcctttattttaaaaactatgtattcatcatcttgtgctatgttctgtgctacgtacagagactacgcaagtttttttttttttcttaaatcaaatatattaccagcctttaaaagggagtttctgaactaacgtgtcacacagacaagtaaacaataatgaagatttggtgtggatggtgccagaataggagagtggttttaggtcagaggggcagtgagcccagactgaggagacagaagagaacattgcagaagtttcttagaggaaataatgccaaggatgagacctaagtgatgagcaggactttggtaaacgaaaaggaaggaaagtgagcattccaggcaaagggaatagcatatgggaagtcccagaggggagagaaaaatttcatatgatgaatgtaagaagatgcagaagaattgcaaaaggtgagaatggagaagctgggactagattctgaattgccttctgagtactgttagcatttggctcattaaaggaacagtgaggaataacttgagaattatttctttgggaagttttaagggcgatcaaaatgtactcacgttttctcttctagaaagatcactctggcctaggtggaaaatatatttcgagagggcaaaattggaggcatggtgatttgctgacatatggtctgactttagtgagtagcagtagaaatgtagagaaatagacaaatttgggagatacttaagaagtagaaatcttggtgatttactcagttagaatttaaaagtgaaacccagatttcctgtttggtcaatgagtagataaatatgcctgggataagaagcaggggaaggaagtgggagaaggatctgatgagtttgaggtacctgggagaccctaggaatgttgatatatagatatgaaactccataaaagtgtgatcacctcatcacctataaaaagttgatctgggctgactaatcaatatttggaagtcagaggcagtaaaatgacaaataaaggccttgggtgatgatgagctctctcagggaaaatgtttaaactgcaacaagagaagaaccttagggaagtatcaacatttaaggaatcagttggaaaatgggagcctacacagtagactatgaaggaccaaccaaaaagaacaagaactgggtggtatcatggaaacccagggaagagagggcttcaaaaaggaggatgtggtcagctgtagtgaatattactgagagattgtgatggctgaggcctgagaagagactactagttttaacaacagtgttgttggtaacattggtcataatagtttctctgaaggggtgaccagagagctgcaagaatgaggagaggtgagtgcagaagtgaagaaaaggagcagagacaacacttgtaagtttcactgtaaatggaataaaggaaacgaggtctaccaagggacatggattgagagggcctttttcatttttattttaagaaggaagacacttgagtgtgttgaaatgctgatggaaatgagcaaagagtgaggaagagttgaagatacaagaacaaagggagataattgacggagagcccttgaggatgatggaggggttgagattcatgagggattggccctagacaaggtacatgggttaaaaggcagaaagaaagaaagaaagaaagaaagaaagaaagaaagaaagaaagaaagaaagaaagagaaagaaagaaagaaaggaaggaaagaaagaaagaaagaaggaaagaaggaaaaggaaaagaaaagaaaagaaaggaggaaggaaggaaggaaggaaggaaagaaaagacagaaagagagaaagaaagagaaaggaaggaaattgttttttagagtagcaatagaatctaggtgggataaagagtcaggagtcatcaaacacaaatgataaataagatatgaaggccagatgttgtcgtgtatttttataagttcctaactatcatactgtacatatcacactggaaagagccctgacttcgacagcaattctgtttacaagttgtgtaaattactaagacaagtaatttaacctactttaatttcattttcctaatctataaaaaaatggaaattttataaatctaccttgaaaggctatactaaggaatacattttgaccatgttaagtattaacacaatgatggtcctgttgtaagattctcaagtaatttaagacataattactatcatcttgtcttaagaatcagttttcttgattgtctttagaagataataagcaaaatcactgagcgacaaccaatagctttagcgtatggatacacaacacatagcatagtgccagacacataatagctactcaagaaatattcatataataaattactgaaagacagctttggtgttctatctgtgttattcagacctttgctttcactatattccagtaaatgctctagcctcaatcctcttcactctctgccagttagtcacttcagggtcacagaagaaaacggttacatcacctgaggaggtttgtcttgactatccatttctgcacacgcagcctacaaagaagaaaactgcttggctcacatggcccagaagactagagtagatgggacctgacccgttgcttctttcttctgttacttagtgtcattttcagcattgtcaccaatgaagctcactaagaaaggatgcctggattaaccacaagcaaataattttggccaaaaatgcatagatttagttcaagacaaaaaggaagagaataaatatattcttagcataaaatggcttcccatggcattttctttctctaaagtttatagcaaactttgtctcctgagagcagcttgaaagcaaggagatgctgaggggaaaactcaatggggagagctgcaacaaattgccccagataagcttaaggcaactccagctctggactcccaagaggctaatgaaccatagattcctacctcttcccaaggcctgatacttacagaaatgttgtcaaagacttctaaagttccattaaatactgtatttttaaaaggtcttcaaaccaagacctgtaaactgataggagttacccacttgctgagagttaataggctctggactgagtggtgaagtttgaaaaggaccattagagacagaacacaacttctcccagcggcctgctctcttcactcttctgagggctctgccatcgaaagccaggcagggcattgccgagtcaaaagacagagcaaacaactaaggagctacttattttgcaattaataataaaattttttgaggtccaggatttctaactaaatctacatgagccttgttatgccaaattattggattataattgtatttggatgtcaagtgaaaatgttgcatacaagtttttctcccaagattttacagatttttcagtatttatctatgtaaatatattacaaatagaaactgagttaataaaagcccatgcaaataatcatccactattgttgcatttcaattactccagtccccaaattactatgtatatttcagatgctggtactttttccaatttaaattctagcaatccctgaatcatgtcatcaaggccttgcctgataatccagtaacatggaaattagttttcttacactttattttaattttatgttcaataagaatatttatagcatatgcaagcaacgataagaataatcacatttcacattttatattagtgcctatcaatggtggaatgaagaggaatttctgtttgtttgcatccatcctgttcccaacccataccactgcctcactagcaaagtttctgatccaagtagtttcaattatttttctgaaaaaaatagaataatgttcaacttgcagaagaaatgttaaatttgtagcaagaatgttgaaggacttggtctctgttttgaagtgttattttctaagtctttaacagagattaaataacaagaatgttatgactgggtctctgctctttacaaaacttgagaattgattgtatccttaaattctctgtgtccctcatgctaggctgtcacttttaactagcatttttatttgagtctgtgtcccagaagctttaaaaaggagagactcttctcatctactcgtatatgccttgcagaagctatgacagcaggtgaggttattgtggaatctgttaagttgcaggaactcagacttcattacattcagaacccattcaataggaatgcttttctagtctttaaaaaacttggattgcaactcaagctagatatgaggttttactgcctcatatgtttatacctgataagataaggagaggaaatcataagaactgtatatcttctttgaaaccaactctaaccaacaatgggaacaatcatgactttatttctgtatttataatttatttctgtcccaggcacaatgtaaatataaggagaacagaacagttttttccttttctagttaaataaaagtagtttcattttgctttggagaaatggcagtaagtcgggggagggtaaaattaagtaattacaaaaggtgtgtaagaatatgaatatttcaatactggagtttccctctactgtcattacatgtaaaaaatagcaagattacataaacacattcaaaattgaaaatttttgtttttctatagaagtatgacacattttgtggaccaacagcaaaagatagttgaaaagataataaaccaaactgtaatactcacatgtgcgtgtcaagatcatatgggatgttaaagcatgattttaaaaattgaacttaggtccactaaacaaaagaaaggcaatacattacatagtaaaggtcctctctgctagaatgtctgaattatagacacagtcaaaatttaagatattttataccctttcaaaaggtagcatgtcccataattaaggcaaaagtaatttattttgtttaatatatataaataatatctccatttctctacgtctttctcctagcatatcaaaaataatattctctagtaaatgttagtaaatattcatgattaatcataagtaaatattagcaatagaaataaatgttactttcagaattcaatgaacttagagctctgaagtaatctaaccgatatacattaacagtctacaacatccctgagaaatggccacacagctcctttcaataccaccagaagcccactattttacaatggaactcactcattctcctactgaacagctctagttgtttaaaaatatgcagtggagatctgcccacctaaaacatccactaaattcctgatgtttcctctagtttaggatcttttcaattttctcagaaacgcttacacagaatcagactcttctgtatgaatcaatggcctaagaatttgtatacatttgcaataaagtcctgattaaagtggggcattaccagagaaatatcatttgaccagcccccaaaggcctcgcagactgtagtgaacaacgggtagggtctagttctctggtctatacagcacaagtttgaccttaaaaaacttcagaattgagtgggatgaagatgacatgtgaccccctcaaaaaataaacagaaattcagaactagtcaattctctgaaatgaaatatgttaactgttaaatgggtaagatattcatgttgttttgtcaaagccattccaatgtgaaggctacatagaagtcgaattattttaagaatgactagacaacagagcatcagaacaagagaaatgggttaactgaataaatatttaatagcatcagaaactaataacctggtgcatctatctctgcacctgggactctgggttggctagttcaggctggttttttaagacacaccaacttgggctgggtgtagtgactcacgactgtaatcccagcactttgggaggctgaggcaggtggatcacttgaggccaggagttcaagaccagcctggccaacatggaaaacccccatctctgctaaaaaatacaaaaagttagctagtcccacatgcctatagtcccacctaagagggaggcagagacacgagaatcacttgagcccaggaggtggaggtggtagtgagccaaaatcacgccactgcattccatcctgggtaatagagtaagactctcaaactaaaaaacaaagacacaccagcttggagagcacttggatagataatacaacttaactttcaggacttctttggccaacctttaatctttgtccaaaggaaaacattctcttttttagaaatatggatagatttagtcaaattttacactgtaatatttctgctttgatccataatgtgttcctttgatagattaattatctaaacaacatcttattttcaactttttagggaaaggaatacaggggcaatggtaaacacatacacacacacacatgtacatactggactgtattgatttaagtctgaactgctaaatctggctttgccccctttctacccacttaaccttacttgacttgcagtaaggtaaggcctcaccatttgccattctctgtctctttagctttccctgtttctttccctgcaagcaccagggtagaaacaatatgagtagctgtactatagaacagcccacttcaatagctcttgactgaagtgttgactagcaatgggcatggagccctattagctctgctgcagataactcagattgtatcagaattgttttttcaaagggtcaggaactctctagaacaaaccatttgtaaacatttaaacaggaaactagttgaggattttaaacacagacatgaagagtttctaccatagccttttatctattttagaagaaagagcacaacccttacattaaacctctttttaaatggaggacagagaaatcaatgtctaaatcataagctactgaaggaaacatgcagacttccagaaatatataatttttatataatttaaaatgttttaatgctttgttattgcttaatacctactatacataaacattaagatcacaaacactatggttcatatacatgtttgtttggatattagatttctgtgtttctactcttaatatactaaaatcttgtttctaaaatatgtctattgcattactagcagtggttatatattcaggttttcaatcaactgatttacttggttggattgactataaatttgttgacatatattgatgattcctcattttcttgcccagagatcatttcttctactaatttattttcaatctctctgctttcttatttgacagtatcctatgagcagcataacagagcactccaagctcataaggaatagtgtaaactaattagcagattttacaatggaaactattccctacccatgtgatcaccctggctggataatgaactttgtgaaaatatccatctcttaccacactaaggcagcagcctcattcagacaagctcttatttttcccttatacttcagttcataattgtgaatatggcacgaatccagaaacaaactgtcagtatggggtgaggtacagtgttaaaaataaaatagactaaaaaccggattttcactttaaaaaattcttgacattcttttgtaactgacagaaagaaaaatagtcctaataagatgtgtttggaaaatactatatctgaaaagacagtgtataactgaaatttagggaagtcacagaaaatttccctgcatgcaggtgttcagaagcactgaggggttattaatgaaccatagaagtgtcgaatagtttgttatgggaagaaggtccagaaataaaagtgaaaatcagagctggttcattacaccagcagtgtgactggcaaaccccactgctaaagtctcctttaaacagcaggtgcatggtttgatcgctatagtgtgtagcccccagccctggcacagaatgaacacagcctcctccatgggttcatgaactgccctgcttccattttggttacacgttcccatgtgggaaatttcacccaacactacccactttaattttggtgtatttgcttactgcagctgcacttgctaccaaaaacattataccacaaaattccaaagtaacttcaaagaagagggaagaaaccaaaaaagttctatacattcttagttttctccatggaagtggtatgttcagttaaatagctgctatcgatgtgcaaatactgtaattcaaacaaaaaaatcaccaaccatcctagctaaagagacacagataagaaacaaactaatgatttaaatgtcatctacaggctctctagtatcttgatggtaaatcccttacaaatttgggtgtgtaacataaaatattgcccatcataatgatgcatataaatatctctacacaagaaagcactatacatcttttacaacttttttcagactttgttttgcagatggcatctggatcttaaagatgtatagatattttgcagctctgtttaatcataaataatagatttgtctgattcgctaataccagaggcatgtttttttcttccaatgaatatgcttatcatccgtgactgctaataataaaacctatacccttatatggaaataaaccatttcataaaaataggaattcatttgccattttccattactgctgactaattactagggtgttgaagagtaccttcagattgaagagtgtcttcagattgagttcataaaagctatatttctcatgtgtttgggcagaaattttcaagaatatcatatttcagatttagggaaaactcaaaagttttatcataaaatgaacatattaagactcaaaagacacttaaatatggcattacaaatatgaagcaaacgtttttggactaacaaaggtcaaaaaatttcaaatatctatgaaaacatggcaaaacaagtagaacatgttgtaatggcaggcaaaagtgttcactttagaatccacgtttattcgttatcgtaagtttaggtttcacatagcattgttaatacaggccaaatatgcatttaaatacacttacagtattcagtgtatactatgtgaatatctacataagtgattttgaaataacgttttcttatttaataggtttattgtggcaacaaaaaaatgtgtggatgctagtgaaaatcatgtttgcagtagattttaaaagcctgaaagaatacatttgttgaaatttgcattcggtttggaaaatgtgtgtttaacaattgaacacggccatattttaacttttaagctttcgtattgcgaaagtatcaaggtattacagcaatttactcttaaggacattatgctgggctttgaaatttaaaaaataggatatttcttcttggagtatttcatgatcaatgtacggtccctatgtgaggaaaattaaagctgtctgacaagtcctagaaacaccactagctgttaaagatgtaggaaattgcatgaaagcataaaaagcactgggtaattttgcaaatttcatctctaaacacaattgtaaagacgtctttcagttctttcttcctcttatttctgaagcatagccctttagttcttgcccttttaaatatctttgcctaccatagctttgcttcttaatgtactggttgatcttaccaggctaagtatttacagggggtgcttacttttatctgtattcacagagaatgctaacaaattagaagaaagtgccagagaacaccacataccttgtccggaacattacaatggcttctgcatgcatgggaagtgtgagcattctatcaatatgcaggagccatcttgcaggtaacatttttactcgcaagaatagttaatgtataaagttaatatgtagaaactaaattgtagatgtttatagaaaattggtcgacattcttcttgaatgggtaatcagcaacaaaacttttctctgctcctcctgtgcatgcatacacacatacacacatactcacacaagcattcacacactaaaaaaaaacaaaaatatgtgcaccttacacactcaagtactatataacacattactgaactgttctagaatttgaaattgtactttgtgcattataagctccttaaaggtacaagttcctccatattaccactctttctcctgaacacagaatagttgctcaataagtatttatcagacaaatgaatggatgaagccttatgtatattagattgcatagttgcttctcagagttcatcttttcctaagtccttcaggtcttctcataaatatcatcaatccttgttttgccaggcattcactattttctatagatctgctctcccatggagccgtgcaaagtgaaatcattagccatacccccccagtttcaaactcagtagagacacaaagaagttgtttatctggatttagtttataaatataaatactggccaggcatgatggctcacacctgtaatcccgcattttgggaagccaaggtgagaggatcacttgaagccagcctgggcaacaaagggagatcctatctctaaaaaaaaaaaaaaaaaaaaaaaaaaaaaaaaaaaaaattaagaattagccaggcacggtggcatgcaacctgtagtccaggagctacttgagagctgagatgggatgatcccttgagcccaggagttcaagcctgcagtgagctatggtcacaccactacactccagcctgggcaactgagcaagaccccgcctcttatatatatattaatatatatgtatttaaatacctactgtatgtctaaaatataattatttcagagatggcaaagccaaaatgaaaacataatttatttttatttttatttacattaagtacaagtgacatatgatgaaatagattgtattttcatttacaacagaagatttctctctctctctctctctctcccccactcttcctccctcccccctccccgccccccacctagagctgtcttcctttcatgttttccctccacaaaatatactagcacaggccttcaactgaagtaaggcagagtgaacaaaactgagaagttactcttgctaccccctcactccccagcagtgtcattattattaaacccttcctgatggagagaaaaaatttctcaggatgtagttatgagaaattcaaagtgaagtaatagaatagttccacaaaatcaatgatatgttgatcctctttaagtattgttttcttatgagctattttctcatttcattgacacatgctaattttcctatgtagattgtctacctgagctttccatgagggttgagtgagaggaggcaacattcattctcagatgaacaatacctcgtcttgttttgcagaactatgttgcctacgtcatacttacttttttctaacaaaatttgactctatcatcagcagatgatttttttgaccagaaaattaatgactcatcctgtaactctgatcctaatatttctcaacatttattctgacaatggcatagagaatgtttcatccaaaacagactaatttttgtacccatgtcatcagaaacacatattttttcaagtaaacatgttgacttaggttgattaaagagcaaattaaataaaatgtaaagctcaccttccagaaaatatagaaataacagtcattcctggacatgtattatctctctatattgtcaccaaaaacaaattatctagtaatcctcctacctttgaaattattatcataaatgtaaaaggaaaccacatatctgataaccgagaaacacaaagacatcttgttaaaaataagtagttgagagccatagccacaaagtaatatttatttagaaagggacacaaaaagccctaattttgtgatgaaaataaatgcccatcaatcaactataaaaatgaatgcaggccgggcgcggtggctcacgcctgtaatcccagcactttgggaggctgaggtgggcggatcacgaggtcaggaaatcgagaccatcctggctaacagggtgaaacccggtctctactaaaaatacaaaaaattagccgggcatagtggcgggcgcctgtagtcccagctactcgggaggctgaggcaggagaatggcgtgaacccggaggcggaacttgcagtgagccgagatgcgccactgcactccagcctgggcgacagagcgagactccgtctcaaaaaaaaaaaaaaaaaaaaaaaatgaatgcagcaccctacaggtaactgggcactataatttcttccaggtgtgatgctggttatactggacaacactgtgaaaaaaaggactacagtgttctatacgttgttcccggtcctgtacgatttcagtatgtcttaatcgcagctgtgattggaacaattcagattgctgtcatctgtgtggtggtcctctgcatcacaaggtcagtaacagcacttggtggctacccaaataaagggatatattgttactcttttatttaatcagatccctccgaggtgagttccttcatggactctgcagccatccattctctatgagtcctatgtccttagcataagagtatttgaatagccaatggagtggtacaatagcatattggggtggtacaaattattttccttaattttgcctgatgataaagattgttttttttacctgcttgaactagtatccttatctacctggattagtatccttatgtatctgaatcagttttaacatatcttggtataataacaaacacatttttatcttaggatgacaaaatagttttcagtcacaaaatgcaaaaatacaagtagttgtacttttatggtaaatgaaaaccttagatacagaaaaacatgcagcaaatatcacaacaaccttttatatcaaattcccagcctaatcaaaaggtaattgtttcctggagaatcaggttaaaagacacagaggtttcctttagtttcaacagaaaagaaaaccatgattaattagcaatgtctgacgttgggcttggagtaaaggaatgaggccagtacttgcttaatttcatttgcatgcaaaccagtggtaaccaagaattggacttcaagccaaatgcaaaccaaccaagaattggactttaagcaaaatgcgtatcatttatgttctgtgtaaccagaaaagtcattgaagatagtccttactgacttgatttcactcttctataaaaagttccaaggaagtttttaagattttcaccaaattcacaaggcgtttagactttcttcatttgtacagctctccagtaaatcagaatgtttctctaaaaattgttttgaacagatacaaaaataaaagaaagtatcgtatctttagaaaataagggtcataatacatttcagtatggtattgcacaatcttctttgaggacaagtgtggcatttgctcttgaaaaagacaaaatatggttcataaatcctcgcctggcctcaaggcttaagggcaggtcattgactaaagctttgggctgctctaagccgagttgagttcatcaactcgactctcacgtttagatgccaagtgattatattaaaatagattctggggaacataaggattacaagaaaccaaaaatactgcatataaaaagaaaaagaaaagaatctaaaacataggaaactatgccatattactctaatatctagccaatatcagtacatgaaaaacaaaacctatatttaatggatataatctcaacaatttgattgctacttcgactactgacacaaatgcaaaactgtaaatactttagctcatgttttcaattctgttatgaatcacagttgcattcccatacataataaaagcaacagaaatatacagggtcctttcctcactaggaattgtgtaagcacatattatgtgtgtgtatcgnnnnnnnnnnnnnnnnnnnntgtaagcacatattatgtgtgtgtatcgtatatgtgtatacacatatacacacatatatatgcacatttaataacattacaaagaagaaacaattatctccactttcaagatagagaccctgaggtagaagttggcaaattgctgacttcacacagctgagcaacaagggcagcaatggtgtccaggtggcctagtgccagagcctggacacttcaccatgctcatactgcactgtgtctgggaaggattttgtgtattctgctgctcaagattatctaaactgagctccaaattagagtaagctatttttccaaggcacatagacttactcattttccatgttataataaaataaaacctgtcctcaatttattggcttttgaggggaaggcatagcacataaactgtattagtattttgtaatgccttttacaaatctgccttaagaccaccaaaccttctagagcctttccaggattcatactagtcaataaagcacaccaattcccagtgtggattcatttcactcacctgaaaacattctgctctgaaaccagactttccaactaggctgtctgtctccaaaccccagaaaccctactttcctgatgacctggccacatttgtctgtcaagacctatttcaaaataggtcttgctaaaagatttacaaaattgcaacaagcagaagtcctcccatttcctttgatttttcgtcttcctcatctggtctctcctgtcttctacatctctcttctatctcttctccttctttctactttctttttttaaaaaaatcttttctcttttgcatcactattttagccaaacacctgccctcctcctaaacaccacatgtgtcacaaaaagtatggacatttggagacatgtttcaaaatgaagagttgccctgttgagaagttggatttttgatctttttatctctagctgccattttttatctctagctgccatttgctgggaatgtgatttcagctccatgttcactttaacagatctatcctccctctaaaactatacatatatatatttatatacacatacatacacacacacacactacatacacataaacccacatatacacatgtgatatatatgtgtatgtatattcatatattttcatatattctgatacttcacagattatatgaactttccactattctcatttgcatagtcaaagcattttttgttacaagagaaaaaagtcagacattttcagataatttgactgaatattagatttttatagatgctaaataactggtaccaatttatgtccctaatttatactagtaatgtacaaaaatgatattaggctggtccaaaacaatattcctttccattacatatcagatattaacagttggttcattctctggtttgataggatttaaactcataacattgaaaagtcaatataacattcattcttaggacatttgaaatataaaattgttgaagacctttaaagtgagataaaatgggcccatgacttgcttgattgcattgtgctgagtcattctttgtgccttaatgagtaagcagttaaggacaaagtaaatgtcttcctcttcaacttctgcctgtgttcaattcccaacaaaaatttaaagacaactgcacagaaaagcaaaataataacttttccaaaataatccaagcttctactaatgataaattctttcatctgaaatattttaataatttgcttaatccacatctttattctgtgattgtagggccaaactttaggtaatagcattggactgagatttgtaaactttccaaccttccaggaaatgccccagaagcaacagaattcacagacagaagcaaaatacagggcactacagttcagacaatacaacaagagcgtccacgaggttaatctaaagggagcatgtttcacagtggctggactaccgagagcttggactacacaatacagtattatagacaaaagaataagacaagagatctacacatgttgccttgcatttgtggtaatctacaccaatgaaaacatgtactacagctatatttgattatgtatggatatatttgaaatagtatacattgtcttgatgttttttctgtaatgtaaataaactatttatatcacacaatatagttttttctttcccatgtatttgttatatataataaatactcagtgatgagaaaaaa

SEQ ID NO: 17 - DNA, 1435 bp, Homo sapiens
ggcggcagagctcgagaggcggctgccgggctgcggggcgccttgactctccctccaccctgcctcctcgggctccactcgtctgcccctggactcccgtctcctcctgtcctccggcttcccagagctcgctgctttccctacctccttaagtgactgccaaacgcccaccggctggaattgctctggttatgatgacagagaaaatgatctcttcctctgtgacaccaacacctgtaaatttgatggggaatgtttaagaattggagacactgtgacttgcgtctgtcagttcaagtgcaacaatgactatgtgcctgtgtgtggctccaatggggagagctaccagaatgagtgttacctgcgacaggctgcatgcaaacagcagagtgagatacttgtggtgtcagaaggatcatgtgccacagatgcaggatcaggatctggagatggagtccatgaaggctctggagaaactagtcaaaaggagacatccacctgtgatatttgccagtttggtgcagaatgtgacgaagatgccgaggatgtctggtgtgtgtgtaatattgactgttctcaaaccaacttcaatcccctctgcgcttctgatgggaaatcttatgataatgcatgccaaatcaaagaagcatcgtgtcagaaacaggagaaaattgaagtcatgtctttgggtcgatgtcaagataacacaactacaactactaagtctgaagatgggcattatgcaagaacagattatgcagagaatgctaacaaattagaagaaagtgccagagaacaccacataccttgtccggaacattacaatggcttctgcatgcatgggaagtgtgagcattctatcaatatgcaggagccatcttgcaggtgtgatgctggttatactggacaacactgtgaaaaaaaggactacagtgttctatacgttgttcccggtcctgtacgatttcagtatgtcttaatcgcagctgtgattggaacaattcagattgctgtcatctgtgtggtggtcctctgcatcacaaggaaatgccccagaagcaacagaattcacagacagaagcaaaatacagggcactacagttcagacaatacaacaagagcgtccacgaggttaatctaaagggagcatgtttcacagtggctggactaccgagagcttggactacacaatacagtattatagacaaaagaataagacaagagatctacacatgttgccttgcatttgtggtaatctacaccaatgaaaacatgtactacagctatatttgattatgtatggatatatttgaaatagtatacattgtcttgatgttttttctgtaatgtaaataaactatttatatcacacaatatagttttttctttcccatgtatttgttatatataataaatactcagtgatgagaaaaaa

SEQ ID NO: 18 - protein, 364 aa, Homo sapiens
LSLHPASSGSTRLPLDSRLLLSSGFPELAAFPTSLSDCQTPTGWNCSGYDDRENDLFLCDTNTCKFDGECLRIGDTVTCVCQFKCNNDYVPVCGSNGESYQNECYLRQAACKQQSEILVVSEGSCATDAGSGSGDGVHEGSGETSQKETSTCDICQFGAECDEDAEDVWCVCNIDCSQTNFNPLCASDGKSYDNACQIKEASCQKQEKIEVMSLGRCQDNTTTTTKSEDGHYARTDYAENANKLEESAREHHIPCPEHYNGFCMHGKCEHSINMQEPSCRCDAGYTGQHCEKKDYSVLYVVPGPVRFQYVLIAAVIGTIQIAVICVVVLCITRKCPRSNRIHRQKQNTGHYSSDNTTRASTRLI

SEQ ID NO: 19 - DNA, 2078 bp, Homo sapiens
atgagtgtgcgggtagcccaccctgaagcccgagcttctcatttgagccatccccgcctagccccactcgggccagcgcctggcgagcgagcccatctgtggcttccgcggccgcctcctccttgcatccttgcacctcctcgtcgacccctccctcccgggacctgcatcctgctccaccaatcagagcccgactgcctcttcccacgtgaccccgggcgggctgaggacctgctgcttcccaaacgccagagggatgcgggcggcagagctcgagaggcggctgccgggctgcggggcgccttgactctccctccaccctgcctcctcgggctccactcgtctgcccctggactcccgtctcctcctgtcctccggcttcccagagctccctccttatggcagcagcttcccgcgtctccggcgcagcttctcagcggacgaccctctcgctccggggctgagcccagtccctggatgttgctgaaactctcgagatcatgcgcgggtttggctgctgcttccccgccgggtgccactgccaccgccgccgcctctgctgccgccgtccgcgggatgctcagtagcccgctgcccggcccccgcgatcctgtgttcctcggaagccgtttgctgctgcagagttgcacgaactagtcatggtgctgtgggagtccccgcggcagtgcagcagctggacactttgcgagggcttttgctggctgctgctgctgcccgtcatgctactcatcgtagcccgcccggtgaagctcgctgctttccctacctccttaagtgactgccaaacgcccaccggctggaattgctctggttatgatgacagagaaaatgatctcttcctctgtgacaccaacacctgtaaatttgatggggaatgtttaagaattggagacactgtgacttgcgtctgtcagttcaagtgcaacaatgactatgtgcctgtgtgtggctccaatggggagagctaccagaatgagtgttacctgcgacaggctgcatgcaaacagcagagtgagatacttgtggtgtcagaaggatcatgtgccacagatgcaggatcaggatctggagatggagtccatgaaggctctggagaaactagtcaaaaggagacatccacctgtgatatttgccagtttggtgcagaatgtgacgaagatgccgaggatgtctggtgtgtgtgtaatattgactgttctcaaaccaacttcaatcccctctgcgcttctgatgggaaatcttatgataatgcatgccaaatcaaagaagcatcgtgtcagaaacaggagaaaattgaagtcatgtctttgggtcgatgtcaagataacacaactacaactactaagtctgaagatgggcattatgcaagaacagattatgcagagaatgctaacaaattagaagaaagtgccagagaacaccacataccttgtccggaacattacaatggcttctgcatgcatgggaagtgtgagcattctatcaatatgcaggagccatcttgcaggtgtgatgctggttatactggacaacactgtgaaaaaaaggactacagtgttctatacgttgttcccggtcctgtacgatttcagtatgtcttaatcgcagctgtgattggaacaattcagattgctgtcatctgtgtggtggtcctctgcatcacaaggaaatgccccagaagcaacagaattcacagacagaagcaaaatacagggcactacagttcagacaatacaacaagagcgtccacgaggttaatctaaagggagcatgtttcacagtggctggactaccgagagcttggactacacaatacagtattatagacaaaagaataagacaagagatctacacatgttgccttgcatttgtggtaatctacaccaatgaaaacatgtactacagctatatttgattatgtatggatatatttgaaatagtatacattgtcttgatgttttttctgtaatgtaaataaactatttatatcacacaatatagttttttctttcccatgtatttgttatatataataaatactcagtgatgagaaaaaa

SEQ ID NO: 20 - protein, 374 aa, Homo sapiens
MVLWESPRQCSSWTLCEGFCWLLLLPVMLLIVARPVKLAAFPTSLSDCQTPTGWNCSGYDDRENDLFLCDTNTCKFDGECLRIGDTVTCVCQFKCNNDYVPVCGSNGESYQNECYLRQAACKQQSEILVVSEGSCATDAGSGSGDGVHEGSGETSQKETSTCDICQFGAECDEDAEDVWCVCNIDCSQTNFNPLCASDGKSYDNACQIKEASCQKQEKIEVMSLGRCQDNTTTTTKSEDGHYARTDYAENANKLEESAREHHIPCPEHYNGFCMHGKCEHSINMQEPSCRCDAGYTGQHCEKKDYSVLYVVPGPVRFQYVLIAAVIGTIQIAVICVVVLCITRKCPRSNRIHRQKQNTGHYSSDNTTRASTRLI

SEQ ID NO: 21 - DNA, 21254 bp, Mus musculus
  misc_feature (1)...(21254): n = A,T,C or G
tttgagcactggaggagaagactgcaactgctcctggcagacatgaagccgtacttctgccgtgtctttgtcttctgcttcctaatcagacttttaacaggtgagtggccatccatagctcttattgagttctacttcaagagaacattaagaaaaatctgaagtagaaaaattaagtaaaaatggaaaatgattttattttattttattttattttattttattttgtttttaacaagcacagacagtttcagaggcactgaagctcacggctcagggcgtcatgcccggtcagcgtggatgtcagtgcttcttttgatactgtgttttaacatgaaaaagtacatttcaacagaccattaaaattttaaattacttgttcaaagttacctgacagtgtataaagtaggagagtagctcactctttttagagaaagatgaaaggcaagattatttgtgtcaaaagaatagaaattgaatagccctggaaatccttctatagtagagaaaaaagtggatgacttccaaaaggaaaattttgactttactcttacctggttggtcctaagtcttaaatgtacagtctgccatagggttggtggtttttgttttgttttgttgctttttatttttgattgttttgtttttcaagacagagccataccaatcctggcttatcttataaggcttttagacactagatatgaagatcaccccaaatgtaaaaagggggagaaaatgactgacagcattcactagtccctctagaccttaaacattctggaatctttgactctttttcgtgggtgacatttatcagactctacatgagaagtttaaagagggtcatgtgcagtgtaagtaattacatacagtcttttgctgcttcttattatatgcacttacatactgttcttgaaattgggataagtgaagtgaaacattaagtggtgggaaatgcctttaataggagaagcaaaagcagaatgctcagtggtataagtccatctggaaatgcatttttttcagtggtagaaagaaggagacattacttttctctccaaaaagaagtcaaacctaaaattggatttattaaacatttagtattgtgctgtttcaaaggcactcaaatgttcttaagaaggatgaagagcgaagaccttgttgtatttacctggaagaagtactaagaacagctctgggccagatgtgttttctactctgcacgctagttttacaacccccctgaaaagcttagcagcatacgtgaaacaagaaaaaccatggcagggagatccactcatttactcatccactcatccgttcattcacgcatcactggacacttgccatgcaggagatgctgggctggctattgtataaacagtggtgagcaagaccaggcaggcccactctgctgagactagctgagtactagtgaaagagacatgaatcaaacaatcgtatgaattgatggcaagagagggcaccaaggatccaggtcagacagggaggtgtgtgtgtgtgtagctagagccatacagactgttctgtggaaatgacgcttgagttgaaattggaaggacagataggaatcagtgggaagagcagtgtcaagagaggaaagacaattcaatggaaagtcaatccaaaggatctgtagttttcaaggaaggtcagagggctgatgtggctgagcacagggaggaagggaagctgggcatgatgccagatgaggctaagaaagaagtcagtggtcagacttctcagcccacagggccatgctaaagagtttggaatttcttccaagaacatttgtacaagttattgcatggttggtttgggatgcatcaaaagttttctgtatcccaaacccattcgggtagttgtggtggtggtgctgtactcaaaagacttgtatcaacagtggtgtcatttctgtagagggatggattcagctgtaggattctcatgagttgccaagctaagctgatcaataagatcttctggaatagtcacctgagatccttagtgagtaaaaaccaatgttcgttagtcttatgacacaaaaaaaactgtgttatgtagaatgccattttccaatgacaggtaaacaggggtaataaacatgccaatgatcatcatattaaacgttgccctaggtcacacacacccaggaactcctaatttcatagctataaacagaaccaaactgcaggaaactaaacactcatgggtagttataacacttttagtgtttctaactcttggctctgtcttgacaaaatgatacagggattcttgccctcaggcagtactgataaagactcataaaccagggaaggctaagtgatttgtcacacaacacttagtggcagaaccattggtagaagcccaatgtgcccagctccattgaagatttgtgaacaacacaaattaagaagattgagaattaagaaggttgagagtcttgaacattcccagtcttcaatggatctcagtgtaaaagtctacaaaatatttttgttttaatgattctggaatggcagaaggctctttcttacagaaggatccgcagaaagaagctataagagaagagcccctacttgggcaatgggggtggtgtgggtgacctgctgaattctggctttaggaagactactttgaaggcagtgtagagtgaagccagtggcaatgactgacagctggtgatatccagcaaatgcttgtctcagaaggtattctcctaggaagctgggatggtagacctcagactcactctatctctgacagtgactgaacagttactcgagaatcccaccatctctggagaaatagccatttggtgttcttagcaccagatcctccccacagagctcagagaggtctggggtgatgagctgacctctgggtcctccctttgagcacctgtttctagaattcaaactgcattgaaaaactctgcattgctaaccttttgtctggatagatgaatgtaagccattctcagcatgataagccttgattttatgcctccaagagtgtatgtatttacctctgattttcctgtgttatttaatctccttgtttttctctgtgttttgttgagatagtaacctttccttttaaattctctggtgaatatgaaaggctgacgatacttttttttttttaaagattctttttattttatgcaattggatgttttgtctatacttaacgcctgtacaccacattcatatctggggtccatggaggccagaagagggtatcaggctccttgaactgaggttagagatggctatgaaccaccatgaaggtgtagagatttgaactcagatcctccagaacagcagcaagtgctcttagtaaccaagtcatctctccaagccctgatgacacttcttaatctatcaagttgttatgttcagagaaccataatgaataattagttaaatttattcattgctgggaattgatcccaggaccttatgcttgctaacatgtgttctacaactgagctgcacttccagtcccatttactacttttttatagaaataagcattgttgtgctgtcgtctgtaatgcctaacccctagttgccacactggcataagaaccttgaagtgaccttctctctgccactcttccactggccccatcattggtccacgcatggccttagttgaaatcgcctcaagtaagagcattgctgtgttccctcctgagagcactcctctcctgtccctctaaccctttctttgtccttctatcacagaactggacttcagagtcagcatcaatgtggatgctgctcctttcttgaggcctctgatttaaccagtgctcagagcccttctgttagtctcaacacaggggactatgtctccctccttaaacattggggggaaacctttatggcttaaagttactagtaccacagacaccattctcgtgactacgagttctagtctgtagttgctctccctggaggttttcatctaagctctgtggctttctggattgcagattaagcactttatgctagtctgagtctttttttttttttttttaacttaatcaaagaaaaatctttctagtatttagtgaaaaacaatttttagacaaggtctcaggtagcctactctggctttgaactttggattctccttctacacctccctagtactgggattataggtatgggccaccactggtctatgaggttggagactgaacctagggcctcctgtatgccagaccctaccaactgaccaactgccatacttgtagaactctgtgatcttgaaagccgctcattttaacattgaaattcaaggatttcaccctcacatggctctctttctcacgtattttcatgaactctgtctgggaccagacactccgtctcaatttgtgaactcaaactttattccttatttccagtaatttttttcttcttctagtgttggatcacattttcttctttgtctccccctctttctagaaatttctattactctcacgtgaaacctttctcaccagtgtgaacaaaattcctctcatttttatgcttattaactacagcttcttcagatctattaagcttttaaagttactagaaccttacaagtaacctgtaggcacacagagaaagaaaacaacccaactcttgtcttagctttgcccacaacaccatctatagcatttgttactcgatgtaaaatgttcacaccagcaagtgtaataaattgaatgaatattgtcacctatgctaccttcctcttctaagatcattcgatcattctgtttgagatgtaaagtgaattcctgagctctccaatttagaaaagatttaaatcattcatattttctacataagtggtgactgtgtttcttaatcttctaataaacaagttacttgtctagtaaacaaagtctgttacgtggtaggtttcagtcaatctgggaagaagaaaatattaaatttatataaaaattcaaaattatgttttaaaaagtagagcctaagtatgtgcagaccatgaaacatggaagttgaagctgttggtcaagccatggtttggtttcactggtttggtctgtaaagttgtctaaaacagacaatggtgtgcaaatctgaagagagactagaacttggggctgggagcttctgagggccatgaatggtagtgtgtttctatgactgctttgctcaaggaaaagtggagaagagataggttatgactaagcagagcaatagactcaagtgtttgtgtgaacttgaccatgggtgctgatgaatcaactttttctgagtcatgttgttgcaggtaaagtacttcccacaagcaatccaagatttttcagaggggactgcttttacatttgagaaatcagacttaaacagctagtgtttatgctggccttggagaatccatccatgcaacagaaacaacataggcacttcattacactcaaaatcagtttgtaccatctaagattcaagcaaaaatactataaaatgtctgtttgcacttgtttaattatacatatataattgcatttttacaggaagacaaattactggaaaaatttcgtgagaaatttcgaccctgatatcaagaattcagattattttttcaggtttaaatacacagggcagcttaatacacagtggttgataaataaatatctagataactaaaggtgttaaacacatgtaattgcatgtttgaggagcaatcttacttttatttggtggctaattgctttttagtcacagaacacatgcacagcaccaatgcaagcactaagtatttgtcaaactaatacatacaccttaaaggaaaagaagaaaggctaagaggaatttgcacctctcacttaacatttcttttcccatagcaaatctcttcagatcctgtacttcagtgtctgtaaagtgaggggtctggatgaggatatcagactgggaggcccattcagtaagtggactctgaggtcacattgattcaatggacaacttatagttactgctgactttattagcttggataaaggctattggatatatataaatatatatatatataaagccttagtttccccagttgtaaaacagggattaagaaatgaccgtctgacttaaaagttagctttggaaagcaagtgatatattttttataatacatttaggaatgtaccctgtaagtagttaatacaatggaagctcctgaaaatgattgggattcaaaaaattggatgggcatcaatcattttgaatctttggccttgccttgtaatgtaagcgctccccaatttccagcaaataagacctctttctccatttgtcttattttcttggtccatgctaagagcatgttgaaccttcatggcctaatcttcatttatttaaaaaaaaaagtatctttgaattcctactgtgttccagatcccaggagcaatgcaattcttatccttgtagacttcatgattaaatgacaagaataattaggatctactatatatgttagaaatatgttggctaagtaaaatgttaagagcatagagttaggagtctttgggcatctcagcaacagataaagggaagatttgctacttaaaacagttcttaaagaatgaaggagtatttctagtgggataaggggcagattgaactttgtagtttgtagaaacagaagaagtgctgtggaggggatggcctacaacttcagtatggctggaccagatggcccatgggatcacggaggctttggtgtcatgccaaagagacaggctttttaccttataagcaacaggggactaatgaagactttcaagctggggaataaaatgttctttagaaacccaattttagaggcagatggaggaaagagacagacatgtgtgtgtgtgtgtgtgtgtgtgtgtgtgtgtgtgtgtgtgtgtgtgtgtttattttggagtggggatgggcagctaagaagttgcttctacagatggaagaagacacaaataaggtttggattggcaattggaacagagaagaaagactaagtacaagagatttctataagctagagtcaactgaacttagtgactgattggatgaaagagtcagagaggagaagagatgatgaaggctctgcgtgtcctgggcctggtcagtgattctctaaagatacagtgtagggtttagtgagtgaataaggttttgcttgggcatgctacacttgatgtgttgactgtatctagagagagatgctaaaacggataggaaattggcctggagggctgagctggagataagcatcaatgtaaatgagttcacacacagatgtccttgtgtgtgagcttaaagcactgtgcatggcaactgggaagaggaaagcaatatttgtattcatgatctcaacaccaatctcccctcccctctgtggaatagagctgatttcacttaatctcatgtgatttccttcctatgataatttcaaaccagtggcagcgagatcactaacagagtagtttatttgcaaattaattatgctgtgaatattgattcaaagttttacagcacctttggggtttttccattttcacaaagaaaataacttttaactagaagaaaatgggactttcacttttcttattatacatgcttagaaaaccaaggttgttttcccctccctttcagagttccttggagagtaaaagcagctgtcatagtgtgtgtgtgtgggggggnnnnnnnnnnnnnnnnnnnnnnnnnnnnnnnnnnnnnnnnnnnnnnnnnnnnnnnnnnnnnnnnnnnnnnagagggagagagagagagagagagagagagagagagagagagagagagagagagagagagagagagagagagaacattttggtttgtgggggttgtctccagttttccttacatttttggtctgctttctctaaatggcatagggtttattttgctcactcatcctactatggaacctactctctcttactgggtttagggatgtttttgaattataatgtgagtgtaggcacaatatacagataagagcctaccagccaggattctaaagggtttagctagtggactcataagtgccacgcactctggttgagtcagcctgtcccagagggtctgcggcacacaagaaatggcagtttttatgaaagatgaaagactggtagaaaacacatttttaaaataatgctaaaattcacgagtagaagatcaaatgtaacaagtctctaatacaatcatcttaactctgataaaagtcttttgtgtcacactctcgtgctatactgagccacctgaagcttatcattgtttgactgcagaaaatatgtttaataagcactatcaataattgcaaactcagaagatcttatcgctcactctgagacctttgtagaggtttgtggttagaagtctgagttaaaaagaataaaatcacattgctagtctgttttatatcctctgcatggtgtggggtctctatatgtttctttaaagctttttttcaaccagagctaatacaactgcttatagagtcccagctgcgtaagtcctaggtgcactatctgatacttaaaaataaaatacgttggatatcaaaggcatcaatttgcaagtagaatctctgaattctcctggattctttcttcggggagggacctttctcaagaggttttcttctttttcctcctcttccttctcctctgttcagcttcttttttctgttggttgggatatcacctcgctttgtagtcaaggctgggcttgagctcactatgtagctcaggatgggcttgatcctacggcaattcttctgcttcagcctcctatatgttgggattataggatgcattatcatactggctccagagatcttaaccgtccctaaaataaaagacacaaatgctcttatttttggaaaaaaagaaaagaaaagaaaagaaaaagatctaaaaactcccataatacaaaagctctgactttgcttttgaaaacagtccattggtagtattatatcataaaatccactttattttaaaaactattataaaaatcacaacagcaggtgacacttttgagcctggtgagaagagtataccctataagatgtagtgctctgagtgattaaaaaaataaatctaccacctcttctctagagtgaatatcatctagatgtgtcaacagagggcacatgtacattgctatcaaagtgttccacttaacactcagattttaagacatcacaaggatataaatgagcacattactatttgtgctttagcttaagtgttgaaatgtgtatcattggtgcttggatttaaaaaaaatcactaatatgtggtgtttatagacattcggtggattagcagaatgcttgttctggcggcccatggcctgttcacacactgggcagattaaactattatatatttcaagagagttaaagaatcagaattaaacctgtctggccctaagtaatcatgaaaagggaaaaaatcaaacaaacaaacctgtcagttagcttggcaaacctttttgaacctggtaggtatctacagttaagagtatcactcccacccatttttctgtctttctccccctgtgtgtgtgtgtgtgtgtgtgtgtgtgtgtgtgtgtgtgtgtgtattagagcctgtgcatatgtgtatgcatgcatgcatcttgaggctagaggttaatgaccggtgcctttctctagtgttctttacgtttctttgagacagcatctttcactgaccctgaagctcaccgatttggcttgagtagctctatttggctctattggctttttttttttaagggctttctttatttcannnnnnnnnnnnnnnnnnnnnnnnnnnnnnnnnnnnnnnnnnnnnnnnnnnnnnnnnnnnnnnnnnnnnnnnnnnnnnnnnnnnnnnnnnntcccccataccctccccccactctctacccacccactccccctttttggccctggcgtttccctgtactggggcatataaagtttgcaagtccaatgggcctctctttgcagtgatggccgactaggccatcttttgatacatatgcagctagagacaagagctccggggtactgcttagttcatattgttgttccacctatagggttgcagttccctttagttccttgggtgctttctctagttcctccattgggggccctgtggtccattcaatagctgactgtgagcatccacttctgtgtttgctaggccctggcatagtctcacaagagacagctatatctgggtcctttcagcaaaatcttgctagtctttgcaatggtgtcagcgtttggaagctgatcatgggatggatctctggatatggcaatcagtagatgttccatcctttcgtcacacttccaaattttgtctctgtaactccttccatgggtgttttgtttcctattctaagaaggggcaaagtgtccacactttggtcttcttttcttgagtttaatgtgtttagcaaattgtatcttatatcttgggtatcctaagtttctgggctaatattcacttatcagtgagtacatattgtgtgagttcctttgtgattgggttacctcactcaggatgatgccctccaggtccatccatttggctaagaatttcataaattcattctttttaatagctgagtagtattccattgtgtagatgtaccacattttctgtatccattcctctgttgaggggcatctgggttctttccagcttctggctattataaataaggctgctatgaacatagtggagcatgtgtccttcttaccagttggggcatcttctggatatatgcccagaagaggtattgctggattttccggtagtactatgtccaattttctgaggaaccgccagactgatttccagagtggttgtacaagcttgcaatcccaccaacaatggaggagcattcctctttctccacatcctcgccagcatctgctgtcacctgaatttttcatcttagccattctgactggtgtgatgttaatgaattccaagactttctccctagccactctcagtgctggggttatctaggcaggctggcatactcacctttgtttatgggtgctggggatctgaactgacgtctcagacttgcatggagctccccagtcatagtgcactgctgtcgctctttatattaatgagccaaactcagctaaaggctaagaagaatttatgatttgatatttagcacatccgtcctataggtacaaagtaatttcaaggtaagtatttaactactgtggttgcaaacattcaaattgcacgtttacagttgccaaacttttttttttcagactgaaagcttaaaacttaagcatagggaatgtggaaacatgagtcagtcttctcattagcacattcaataatggaaaggtgagccaggacgtgtttaagctaagaatgatcatcaacatgaatattcatgagtacctgatagatgacactttggaggctgctgttgattttaataccctcggttctgcatataagaaaaactgaactcttcctagccatcccatatcattctgtaggcaagaaagatagttgcactcattttagcattttccagagtccttggaatattcttttttaaaaagaagatcgtgggaaacatgatatcattgaagggaactcacctggcagtgaagatgtctctcttgattgtctgtgatctcttctagatgcgttaacccacagaaagtaagtgttggaaaggatctctctctctctctctctctctctctctctctctctgtgtgtgtgtgtgtgtgtgtgtatgcgcgtgtgcacacacactcgagtgcacagaagtacatatatatgtacatgtgtgtatggtcaacattaggtgtcttccttagtcacttttgaccttgatttcgagacagggtctctcccagaactcaagatcaccattttgcctcgtatgtgctctgcaagtccctaggttctgcctgtttccgatcctgcagcaccaggttatcaatgcacactgccatgccaggcttctggtgtccaaacccaagccttcatgcttgtgtaataagcaattttcccactgagccatctctccagaaagaactctttaaagacactcttttcacttattttacagacggaaagagaggcattcgcaggggtattctaggcagagacctgcatgccaggcatgaggcagaacccaaactgtgctcttcggttccttgagcagcactgtacagcagtcccaaagctaattttcacctagtgccggcttgatggtcatagtgtaggcaaagaaggggaagctgctgacacactttttatgtgatgtgtgtatacagaggctatagacagttttgacccaggatctctttgtggtttgcttgctgccattctaaagtctctgggaaattttctctgaacaatgctaaaggaaccgagaagctgtccgctggctgatcttatcttctgcagcagatagcagagacagaggctgcagcacagcaggagtgcaacttggcacttactggcggaaagtcctcagacagcgcaacttcaacttcactggaagccagtgcaccccttgttgtggtccgatctcaccccctttgcttttaacttgctcctttaactctatgaaaagaagcgaaagccgctttattttccttctgcgtgcttttagactgtaagacaaaacacccagcagaggtgtgaacaaacaataaatgaacccttagagtgaataaccatgacacaggctacctcacccccacaattacctcaagccaaggataaagtgttgttagcacacacacacacacacacacacacacacacacacacacacagacccttttgctttctatgttctttacggatgcaaactctcttctccccttcaggcaagagcattatgggtggattttgtagcagccattcaggtgtttgttgcacctctgctctcagtggtgatgcagcaaatcaaaacgtgtgtacattcactatctttataatgtgttctgggcagacaggtggcttcttttggcacacatgtgatttctaattctgctgcctcatggatagtctgtatagcttctatgaagacatcactgctgtgtcctagacttgcattgtttggaaggtagtcagtgctatcaattttagacactctagatggtcgtatgtctagcggtgtatttttttttttgaattataaattctaaaatgtatgatttattagattcactttcttttttattgggtattttatttatttacatttcaaatgttattccctttcccagtttcccctctggaaaccccctattccatccccctccccctgcttctataagggtgctccccttataggtgggtggatgacccacctactcctgccttcctgccctggcattcccctatactgggcatcatgccttcacaggaccaagcgcctctcctcccattgatgactgacaaggccattctcggctacatatgtggctggagtcatgggtcgctccatgtgtactctttggttggtggtttagtccctgtaagcccggggtaggggttgggggtcaggttagttgatattgttgttcttcctatggggctgcacaccccttcagctccttcagtcctttttctaactcctccattagggaccccgtgctcagtccaatggttgtcttggagcattcacctctgtatttgtaaggctctgacagagcctctcaggagacagctatttgtaaaatcaactccacatcttttctacctggctcgaatttttacttttaaagtctagggtaatggcagtcccagatgactctgactaaaatccccggacagagacttttctggactacacccaacatgagtgtcagtttcctgaggtttctctgtattccaagggcccttccagcattctttgaaaagcagattattgaaggaaacacccccagcctccttgctttgctgactctaggagataaagcagaaaaagaaagaaagaagagcaaaatcgccacggaagtcctgctcccgcccctggttccagggccttgtttactttgagctgcattttctagggtaattacttaatcccagcaacactacctttaggcactctgtttaccatttcctgttttatggttgaataaagtgtgttgactgatacaattagaagctggaacacttgttgtttgtcttttatagccatgcctctcattggaaaataacccctaggactatgagaggaatgcactcagggctagaggcactaaaataaatatatgaattgataaataaattcaaagggattttgatgaagcttaaaagatgctaaggcaccaagcaaattgatgctgatcttaatgtaagcggtacccttctttaaggaagtaatatgctaagatgaatttggacaaatgccatagtgtttacagaaaagccaagtgctgagaaaagtcctggtaccaccccagtgctaattttaataaagcatggaaaatggacactgatggctcagtatacactcattaaatgatcacaacaatataataatgcgtttgctatgcaaaataatgccactaaaagtcaaaatcaaaaatacagaaatattttttgttttactagggatgggtattttttctttaaactttttttgtattgtttgatatttttaaggaaaaaaaaagagatttagcaacttgagtaagaactaccattctgatatttttccaaacaattttagtgtaaagtttttcattaaaaaaagatacatcattttaaaaaagtgacataaaccaaacaatttgaacctataagccagtagttcacaatctataaccaggttaaaaccatttcagtgtcttcctcctgtgatctccatgaagccctcaaggccaaccctggttccagtgatcctaaaaagtgaaaaatgagcaaaaccctgggacctcaccttgatgactgggtcaattcggttcttagtgaatggaagacatgctattgtccaatcatagcagagctgtttctttcctttccagttggaggatgtaattctctctgtctctgtctgtctctgtctctgtctgtctgtctctctctctatatatatatctatatctatctatatatgcacatatatatttaattttagctccagtaaatttgcatacttttaaaagcttttatttgccataatatctccctaaaagtttttccttattaagttaaaagagactcatgctgtggtttcaggtttaaaccttctttaaaggcattttctgaccctacagtgaatactgtaacacaccaccgagccctaccacatttccccagagggcacgtctttgttccttagtataaatgatggcaaatcaacacgcgtttatctgtttaccatctgcgtcccccacccccatccccagtgtggaacctgtaaaagcgtggagactatctgagtcatattatctaaacatgttacttgatacataacattttatattctgtctatcacatgaaaagcccatttctcattaggtgtattctagtgcatagttttctcttgtcacattctggttttgtttgcttggctataagatctttcattttggtatacataggagtggctttataaaaagaaatcacttaagttctcacttaaaaataattattatggcaatgtgttcacaacataacacacttgctttgttctcttttttcatccaggagaaatcaatggctcggccgatcataggatgttttcatttcacaatggaggtgtacagatttcttgtaaataccctgagactgtccagcagttaaaaatgcgattgttcagagagagagaagtcctctgcgaactcaccaagaccaagggaagcggaaatgcggtgtccatcaagaatccaatgctctgtctatatcatctgtcaaacaacagcgtctcttttttcctaaacaacccagacagctcccagggaagctattacttctgcagcctgtccatttttgacccacctccttttcaagaaaggaaccttagtggaggatatttgcatatttatggtaaggcattggctgcttttatcatcgtgccttaaaagtatatgctcatctccaagacttctcccaccaagggaaatacacctctctctctctctctctctgtgtgtgtgtgtgtgtgttgtgttgaaattcctttagaagtagttgacagcagctcattttggatgaaatattcatgaaatgatatgtcgttaatattagttgatatttatttggaataagtgatttatttacatacactgttaagttagaattagggcacagtctttcgaaatctttcatgactcagtggctattccgtctacttgcctaaggttggaagcagcttggagaatgaggtgagccgagtgaacatcagtgttacaccaagtatgttcccacgtggtcttgtgaaagcagcagacaggaaggcaccacctattagtcacatttgtaaacacactagattcgtaaagtttcttgattaaaaaccttctttacattttatgaaagcattctctacttatgaatgaggacacagtctttcattcagggtctttcatcaacatactttcccctcttcaacccagaatcccagctctgctgccagctgaagctctggctacccgtagggtgtgcagctttcgttgtggtactcctttttggatgcatacttatcatctggttttcaaaaaaggtaagtgatttttatttttttcttatactttctttcctaggtgttttttttttttctctcatcaaagaatgacagatgcttctcagagtaacctgagcaaaggatataccacacattttccttaagacacgcatactaattaagctaggatagaccatgcattttcctcacaaggtaccaatagtagttaagaaggaaactgctttttaaaaatatgttacatcatctaaacttgtttttaagaaaaatatctgaaaaactattctggacagtattaacagggacaacgaaatatctttttgtggtggaacttttctttagctgttcacatagcaaactttgcaatcaaagaacttactgcattctgcatattatgagtatgagtatataagttggccagactgtgtgtgagtatgtgtgcatgtgtgtgtatgtgtgtatgaatgagtctgtttatgcatacgtgtgtatgcgtgtgtgcacatgtgagtgtgtgtgtgtatgtgtgcatgcacaactgtaagcatatgagtctattctctccttgtatcacttcagatactgggaattgaacactcaggtcatcaggtttggcagcaagtgcttttacccactgagccatctcaccaattcagaaagcccctttcattgggaaccttttgtatattgttttactgagcttaagtccataattacacttttgtcacatgctacttctacaaaaaaaatccagaaaacacttggaaaacaagcatgaagatgggaaagaacagataacaagccatgtttctaactatctctttcagaaatacggatccagtgtgcatgaccctaatagtgaatacatgttcatggcggcagtcaacacaaacaaaaagtctagacttgcaggtacagctccccttacggctttggggagggaagaacacacttcatggttaagactggaattaatttgtttatttctattttaatagattttttccctaaggataattttagtattttatgtgaaagtctgaattttcactttaactgggcttatgtactctgtagaatattaaaaattatgtttgtgaattggttttagtaaattatcagggttaaagaatggagttcagctagtgtaacatagatgaagccctggtttccatcccagtactacacaaatgggcacggtgttacacatgtgtaatcctagcacttgggggtcagatcgtcagaagggcaaaggcattttcagttacgtggtgagttagagacccatctgtgatttataagatactgtctcaagattatcagagagatggggagggggaagggaagaaaggaaaggaaaggaaaggaaaggaaaggaaaggaaaggaaaggaaaggaaaggaaaggaaaggaaaggaaaggaaaggaaaggacaacaacagtagcagcagcagcaacaacaaggcccagactggagtaagaggatagcaattcaagcctagcctgggctacagaatgagttgcacaaggccaggctcagccacttgatgagtccttgcctccagacaaacagttaaaaaggagattgagatgtatgcagctcactggtagaacacttgcctaccatgcatgaggtcttaggttcaatccaagtaccaaaaaaaaaaaaaaaaaaaaaaatccatagttaacagttgtttcaaggtgattttcagagatgtatctggcttttccttgtaaagttcatgaaaccaggttgtggtcatttattgactatcctttaaatgcaagcttctgagtgaggtaccgtgtgggtgatgagaattttagatgaggctgggaagggagatttaggtggattctggggggagggggagttcatgaaagcactcagttgtttggaaaaatgtacaaggttagaacactttggtggagcttttgcctagtgcatggagagttagtggggagtactgtcaaatctgaggaatatccagagagcttgaaacacccactgtggaaaattttacacatcttgcacccatgggtaggatgatgtacgtaggacaggaaaagaaacagaagctaccacattcttgctaccactcaatggctcagcggcacacatagattgtcatggaatcactgcatggatgagggtctggccttgcactgttagtctttgctctctctttagatagctggagttgaggtccagactgtcagtggctccttcccagagagttaagatcacagctttggctcttgcaatcacttttatttgattactttgctcctgaaaacaacaacagcatacttcaccccaatcactgtcttaataataacgcattgcatcttagtttggattccctcaaatagagcttatgataaggacttgggtgtaaatagttcactggagtggtgatcccagggagaagtggcaaagggggagggaagagagacggggcaagaagaaaaggcaaggtgttggtgctaggttctggaggtctgccttaatgggacctctgtcaactgtacagagacctcccataatttcttttctatgaaggacagggtatggggtgcttaatcactggtttcattaccaacagttgggagctggatgcagagagcatctctccgtgctccctgaactggcctccaactaaagctgttctcatgtcttcaggtaaagccagaggcaggaaagtggggacagggatgggggggggggtcacgtggcactacagtgctgaagcagtcaacacatacccatgagagtcttacttgactgcatctggaccctgtgatggatggttcaaagttcagataatgtccagtcctcacatcaagagtggaatgagcaaaacttcatgggaaataaggacctgaagactggtgtgtgtgtgtgtgtgtgtgtgtgtgtgtgtgtgtgtgtgtgtgtgtacactacaaggaaaagcagaaagctgttgggaaggaactcaactcatgttgaatgttttgttacaggtgtgacctcataagctggaacacccggacccacagaggaaacgcatggactagttcccctgaaacttgaatggagaaattcttctattttctggaccacagggcacctgacttgatttaactacagacaacattctgctggtgttttgtttgtctggatcagtgactatcagtcattcagaatttcagcagactgccctgggtttgctgagtccttttaagatgaaccccttcttaaggaagacccagctcatatatattcaacaaacagacctcactgggatagaatgcccctctctccgtgcctgattctagctatgcactggccaggaaaacaaacatatctccagcatttttttacaaaaaatgccaagggtatgaatctgtaaagcacacaggcagccaatggccaccatctgtcctcatttttcagattccattttctttccatggagatcagcattctttctagaatcagacagtagagggagatgcttcacaacagaagcgcttgtgtttctgcgattttgatgtatatactttatcgaactcatgcattagaaccaacatgctctcttccaattcctagactctagctgatcactgcttcagggcttagatgcctgctcttgccttcaaatttccccttaaagatatgtccacatgtctacttggcagcctgctgccactccaaataggaagctcagcctacattccctcccacccctgttgctcaaaaaaaaaaaaaaaaattagtagatatgatgttcccatattctccctgccaaagtaattttttccagaaaagacatctaaattcagttaatatggtttactatgttgatattagtggtagtaaacatttctcagaaacaaaagcaaattaattttgctgtggtgttttctactattatctgtgtttccatggtgctattaatcacaagcttagctatttttgtagatcatattaaagttgcaagcaaggaaagcaaccctctgttaatgggcaaacattctcctggggtagaatgaattatctatttagcctgaaagctgcggtttctgggtggtggctgccagactacagccacactttgctctctctgggtttgacaggttgaagtagtccccctggagcagcactccaggctacgctggagtcccagagttgggagatgcctgggacaagctgctgctttggtctctgggatctgggaagtacagtagggccaagacagaattccctctcctagaaactatgcagcctggaagtcagccctagcactttaagatagccttctttagaatatgagttagttggaaggattctgaagtgtaaagagcatatgactgctctgagctggaccattttctctactttcctgtctgtatgcctaagacttctggagcagccaatgtgtatgcaacataaaaaaacaaaaaacaaaa

SEQ ID NO: 22 - DNA, 2080 bp, Mus musculus
tttgagcactggaggagaagactgcaactgctcctggcagacatgaagccgtacttctgccgtgtctttgtcttctgcttcctaatcagacttttaacaggagaaatcaatggctcggccgatcataggatgttttcatttcacaatggaggtgtacagatttcttgtaaataccctgagactgtccagcagttaaaaatgcgattgttcagagagagagaagtcctctgcgaactcaccaagaccaagggaagcggaaatgcggtgtccatcaagaatccaatgctctgtctatatcatctgtcaaacaacagcgtctcttttttcctaaacaacccagacagctcccagggaagctattacttctgcagcctgtccatttttgacccacctccttttcaagaaaggaaccttagtggaggatatttgcatatttatgaatcccagctctgctgccagctgaagctctggctacccgtagggtgtgcagctttcgttgtggtactcctttttggatgcatacttatcatctggttttcaaaaaagaaatacggatccagtgtgcatgaccctaatagtgaatacatgttcatggcggcagtcaacacaaacaaaaagtctagacttgcaggtgtgacctcataagctggaacacccggacccacagaggaaacgcatggactagttcccctgaaacttgaatggagaaattcttctattttctggaccacagggcacctgacttgatttaactacagacaacattctgctggtgttttgtttgtctggatcagtgactatcagtcattcagaatttcagcagactgccctgggtttgctgagtccttttaagatgaaccccttcttaaggaagacccagctcatatatattcaacaaacagacctcactgggatagaatgcccctctctccgtgcctgattctagctatgcactggccaggaaaacaaacatatctccagcatttttttacaaaaaatgccaagggtatgaatctgtaaagcacacaggcagccaatggccaccatctgtcctcatttttcagattccattttctttccatggagatcagcattctttctagaatcagacagtagagggagatgcttcacaacagaagcgcttgtgtttctgcgattttgatgtatatactttatcgaactcatgcattagaaccaacatgctctcttccaattcctagactctagctgatcactgcttcagggcttagatgcctgctcttgccttcaaatttccccttaaagatatgtccacatgtctacttggcagcctgctgccactccaaataggaagctcagcctacattccctcccacccctgttgctcaaaaaaaaaaaaaaaaattagtagatatgatgttcccatattctccctgccaaagtaattttttccagaaaagacatctaaattcagttaatatggtttactatgttgatattagtggtagtaaacatttctcagaaacaaaagcaaattaattttgctgtggtgttttctactattatctgtgtttccatggtgctattaatcacaagcttagctatttttgtagatcatattaaagttgcaagcaaggaaagcaaccctctgttaatgggcaaacattctcctggggtagaatgaattatctatttagcctgaaagctgcggtttctgggtggtggctgccagactacagccacactttgctctctctgggtttgacaggttgaagtagtccccctggagcagcactccaggctacgctggagtcccagagttgggagatgcctgggacaagctgctgctttggtctctgggatctgggaagtacagtagggccaagacagaattccctctcctagaaactatgcagcctggaagtcagccctagcactttaagatagccttctttagaatatgagttagttggaaggattctgaagtgtaaagagcatatgactgctctgagctggaccattttctctactttcctgtctgtatgcctaagacttctggagcagccaatgtgtatgcaacataaaaaaacaaaaaacaaaa

SEQ ID NO: 23 - protein, 200 aa, Mus musculus
MKPYFCRVFVFCFLIRLLTGEINGSADHRMFSFHNGGVQISCKYPETVQQLKMRLFREREVLCELTKTKGSGNAVSIKNPMLCLYHLSNNSVSFFLNNPDSSQGSYYFCSLSIFDPPPFQERNLSGGYLHIYESQLCCQLKLWLPVGCAAFVVVLLFGCILIIWFSKKKYGSSVHDPNSEYMFMAAVNTNKKSRLAGVTS

SEQ ID NO: 24 - DNA, 24792 bp, Homo sapiens
ctgaacgcgaggactgttaactgtttctggcaaacatgaagtcaggcctctggtatttctttctcttctgcttgcgcattaaagttttaacaggtaagtggtgtattgaatatttcttattaagttataattcaagtaaacattaagaaaaagcaaaggtagaaaaattacgcacccaaaagacagtggttttggtttttgaaagtaggaatagtttcaggatatggccaagggcaccatgtcactcatgtcactgtggatggcattgagtttgcattgctgcctttgatactgtgtcttgagatgaaaaacatgtttcatcagaccattaaatttttaaattacctgcttggagttacctgtcagtggataaactagcagagtggcttactgttcttagagaaagatgaaaggcaaaatgacttgtgtcaacagaatgaaaattaaatagctctggcatttggactgggaattctttctgtggtagaaaataaaatgggaagtctttgaaaagaaggattttgattttaatcttacctggatgatctgttatctgaaatgtccagggcaccatagagtttttattgacactaagtatcagagttcaccctaaaaagccaaggaggaaaggataatgtaaaaatacttcctagcccctgtagaccttacaaaaaagatcattctggagtccctgattccttctcttgaatggcatatagcagactctatatggacaatttaaataatgctacatacaatgtaagttaatacacgtgtttctgctgctttttactgtatataatttgtactacttttgttttctctttcacactgagccctattcttgaggttgaaaaaaggaaagttaagtaatattaaataacttaaataatcaaataaactaaaagtgaaggcagaacttttagtaggtatgatcctatctagggatacattttttcagtggcaaaaaaatagaccttactgttcttacaaaaaatgaaaaaaaaatgaaatcaaattgatcaaatgtttcatcttgtgctggctcaaagtgagttaagtgcagttaagaggactgaggaatgtagaatgagcacaaggacagttttgggctacttgctggtttatgccttttctagaatctcatgaagtcctttagcggcatgaatgacatgagcagctttggaatttatattcattcttcattcatccatttactcatgtagcgttgagcacctgcctggtagcaggtactgtgccagatggtgtatgtacaaggatgagcaaaaccaggtcaacccctgttctttggaaggtaactgcatggtagagagagatatattaatcaaataatcccattgattaatgataattacaggcaaaactcaattatatgagggaatgtaacaaggagcttgactagactgggtgggtgtggaggtgtagctgaggagcagggttcattgaagtctttcctgtgcaagtggcacttgagcggagatttcaaggacaaggtagcaatcaatggggagaacggtatgaaggtagggaagaacgttccataccatggaaggaacaagtgcaaagagcctgtggcaggaaggaatgaggtaaggttagggaactagaagaaagcagacagatgtgcctgagcacaaagagggaagaggctgagcttggtccaagatgaccaactggtccaagttggtccaaggtgaggctggaaaggaaagtagaggccagaccattcagaccatatagtctatgttccagattttggatattcttccaagaacgttggtaccattcgtggaagggtttgtttgtattgataaaaatcattcaactaggccaaaccaatttgggcagttctggttgtggtattatgctcaggagaattaaagtagcatcggtgtcaattctgtggaaggtgagatccagccttaggtaggattgttttaagtttccagattaagctgatgaataatttgtattctggaacaatattcatcgtagattctaaatgaatacaaccaatgttcactctcattataaagaaagccatgagatgtggcatgctgtttggcatgtggcaaacctgaggcacgagtggctaaatggtaacaataaatctgctagcaatgatcctatttaaaatatctccacaatgcatgtatccagaaactgccatgtaaaagctctaaagaaaaagagccaaactcaagtaaactaagtacttgcttgtcctctgttgtattttcaatcctcccaatttacataggctttctcatgccatgaagatgtaggcattcttacctttagtcagtgtttgaagaatttccaaccaggaaaggttaagtgatttgttacacagtagttggtggcagaaccaaagttagaactctaatgtgactccaacatctacattctttctaaactgtgttgaagtagtggaggtgtaacataaatctaaaggaacgtaaatctcaatgattctgatcacctttgttatttggttgtgaattaagaaggatgggaatcttgctgatttctagtctttgatggatctcaatgtagaatttaacaaagtcttgtttttttttaatgaacttggagcaataggacacttttaattataaaaatatctacgaaaaatgtgaatgtctaactacattttgaagaccctctttgtagaccttataggcaacagggaccatatgagtgatgggacaaattctggttttagaaagactactttaaaagcagtgtggataatacaccagattgggaagggctgatggcagagggtgtctaataaacgtgcatgtattatgatgtgttctgtgaggaagctgggaggatagccctcaaggccactttgagccttcctttgtcactgaggcattccattagtgactcctgaattccacttgggaaaagagcccctcagtgtctccagcgtctgagagaagtctgtgaagatgactgaccctggagcccctcttagcctctccacgactgagtaaatgtcatctcctgacagcacccccttccagagtgttcttgttagatttaacaaaaatcccagttgtcaattttttcttttgatagatgaattcaggccattcccagtcagcataagcctctacttgattttatttctatgtttatttactacttatttttctttgttgtatcctctttttctcttttatttttgttggtgtgatgaaatttcttttgactctcctctttgcctccggttaatttggaaggtcgactacagttcttaatttactaagtaattgacatgttcaaagaatcttaattgaatgtctacttgtttatcattgtatgaaaataatgaaaatgcctttgtctgatgtgcctagtccccatcccctgcactgatatgagaacttaagaatgttcttcctttcccactctcacacttcccccagacagtgcaccctgctccatacgtgggttttgtggaaataatttaaaacttacagttgcagatcattgctaggtttcctcttacagtatttctcttctgtttcaagaatcctttcttaacacttacatcacatacgttcaatgacaacatcattctggacatctgctcctgtcttgtgatctctgttctaatctaatgatcagaagacttctcttattttcgttaaatacccccaactctctgaattccagtacaggtaagggtgtcttccttttaccttgatgagtgactgatatctttcctgggaataggagtcctggatggcagcctttcttcttagtggttgcagatattcctccactgtctgctggcttctagggttgtgggtgaagagtttgatggtagtctaactctcattcctttgtaaaaaaaaaaaaaactctagaatttcataatcttgaaagctatttacttcagtattggaattcaggaattcctccaggatatgtgtaactctctccctctgtttctctttctgtgtgtttctattaattttttttttgaggcggagtctcactctgtcgcccaggctggagtgcagtggcgcaatctcggcttactgcaacctccacctcccgggttgaagcgattctcctgcctcagcctcccaagtaggtgagactacaggcacccgccaccacgcctggctaatttttttgtatttttcgtagagacggggtttcaccgtgttagccaggatggtctcaatttcctgacctcgtgatccgcccacctccgcctccgcctccgcctcccaaagtgctgggattacaggcgtgagccaccgcgccccgctgttctattaatttattattattttttttaagactgggtgaaagttttcaatctctagactcaagctttattcttcatttcagtcatttttttcctagtatttgtttaatcataccttatgctgtttttccccactctttctagaaatgtctcttattcttatgtaagatcttgagtcccttattttttcatcatttgtgaacaaaatggctttcacaacttgctgttgcttgttaaccacaactccttcagatgaaatggatatttcagttttaagttactagtagcatattcccatttcttggtagaaacaaaatgcaggcatgtaggggggactgaaattcttatatttactcactgtaagattcatagcattatttggcttaaaaaaattcatcccagtattcacagttgtaaacagcaaaatctacaacatatactgcttccctactctaagaatattgagttttatatgcaaaatgacttactgggctttgcaaatttttaaaaatgagttttaaaatcatttgtagcttgcaataactgaagaaaagatcacaatttctctgtaaatggcatctcagtactactgctgttctaataaactaggtctgtcaaatggcactttttggtcattcaaagtgaaaaaaacatggcatttgaaaccttataaaaattcacaattatattttggaaagtggaacttaagtatgtaggggatatgtcacacaaattgaaagtgttagtcaagaaatgattttttttttcaatagtttggcctgtaaggttgaccaaaacaggtaaagatttgcaagtttagagagtcagaaactggggatatgaacttccttctggttcatgtataacataatgatgcttgtatctactttgcttgaggaaaaaaaagaaacacgttgtccccaaatagggtgatagaccaggagtttccatccagttgaccacgagtgttgttaggatctgtttatttgagtcatgttgacacagacacagcactttcaataagcaattaatgatcatttaaaggtaacttttttgaatttgataaatagattttttttacagcctgtatttgtgttcttctaggactttgcaacaaagaatctgtacatgcaaaaacaacaataacaacaacaagctgtctactgcactcacagttaaagttctgtttactttgcactatctaggactaatgcaaaaatctcatagatgtgcctatttgcacttatttaattatgatgaaatttacttctatatgtgaatccatttctgtacatttctacaggcagataagtgatgggaaaatcattaagaatttagacttcatcagagaagaacccaggtacaatgacagcccagcttaatacatgatggctgatgaatgaaaatgtctagggaaatgagtgtgttatgtacaatgtaatttcatatctaagtcactttaaaataattttttgatatataataaccctttcaatcacagaacacatatgtggcaccaatgtgaatactactttaagtattaaggtgataatatatccaatatacctagaaggaaaataaatacctgaaattcattttcatatctagcttaatgttaaaagcttctttttgtttttttatttcgtagcaaatctctttagctctgatgctttagtttctgtacaatgagaggattggactagattattaggtgaagagattaagtaagtgtgtgtaccctggtgtcaaattatcttattcttttttctttgtttttgttggactgggttaattcgaagaccttgtcttcaagctctgaatttctttcttctagttgctcaattctattgctgagactttccagagcatttcacctttctaaaattgtgtccaaagtttcctgaaatttttattgttttttctttaagctatctatttccttgaatatttctgccttcacttcttgtatcattttttgcatttccttgcattgggcttcacctttctctggtccctccccaattagcttaataactaacctcctgaattctttttcaggtagatgaagaatttcttcttggtttggatccattgctggtgaactagtgtgattttttgggggtgttgaagagccttgttttgtcatattaccagagttggttttctggttccttctcatttgggtaggtgctgtcagagggaaggtctagggctgaaggctgttcttcagatttttttttttgtcccatggagtgttcccttgatatcatactttccccttttcctatgtatgtggcttccagtgagccaaactgcagtgattgttgtctctcttctgggtctagccacccagcaaatctacccggctctgggctggtattgggggttgtctgcacagattcctgtgatgtgaaccatctatgggtctctcagccatggataccagtgctgttctggtggaggtggcgaagggtgcaatggactccatgagggcctttagctttggtggtttaatgctctatttttgtgctggttggcctcctgccaggaggtggcgctttccagaaagcatcagctgtaatagtatagagagggtctggtggtgggtggggccctagaactcccaggattatatgccctttgtgttctgctaaccagggtgggtagggaagggcagggctaggcatgtctgagctcagactctccttgggcaggtcttgctgtggctgctgtgggggatgtgggtgagattcccaggtcactggagttgtgtacctaggaggattatggctgcctctgctgagtcatgcaggttgtcagggaagtgggggaaaaccggcagtcacaggtctcatccagatcccatgcaaacggaagggctggtctcactctaatcatgcctcctctaaccgccccaagtctgtttccaggcaaagggcaagactggcttgaaaacttgcctgaggctttctgcctcccagctgtgaaagaaaagggctttagtttttcccctgcatgtgaaatctgcatgctggattcacggcctccccccagttcaggccaggagacttcttgccctgttcaaatagttacaaagttcagctagagaattccttctccctgtggagttttataccctgctcctctggccaccctccagatggatccctgtggtgcctggcaagaatgggctgcttggggacccattgagctcccagagcctttctgcagcttcctctacccctgtattttgctccgtttggctctctaacttgactcacctccagataaagtcggaaacttctccacaaacagacgctcagcttctccggtcagagtgtgtgtttgggagaggagggtctccctttcccgtgagtcttttctttttgactgggaaataagtatctcccaatcttcagtaaataggatctttgctctccttttcccactcctcttcttggcccattacaaagatatttaccaaacatgcttagcctttatattcttctgttaatattaattcttttatttaatatgattgagcttccactatgttcaaggtcctgggattttttaggcaactgtaatgcagtccttatctttgtggagctcatggttaaatgaggaagacagacaaaaataattatgatccaagatgctatgtgctaaaatatactggcctaaacaaagtattattgggagcatagaaataagagtctttgtctggtggtcttggaaataaatatctcaagagagaagttgacatttaaaatggttcttgaagagtgaatgagaatttcttctcagattaaggggtaatcaaatattttagttcatggtaacagaaataatgaaatgtgaagcatattctagtagtaaagaacagaagtgtgaaagaaatggccaaaaagttcagtgtggcttcaatagatggcctatgagattgtgaaagcattttgtcaagccagatatatatattttaaaacaccttataagcaatagaacactaatagagacttttaaactggggagtgaaatgcttttctgaaacataattttgggagcagcatggaggagggatggggaggagagagatcagtattgagaaggccagtcaagaggatgcttccacagataagggaagacatgaaaaaggtgtggattggcaatgggaatggagaaaaagaattgaatttaagagatattcatgagctggagtcaactggacttggtgaccaattggatgatgaaaatcagagagaggaagaaatgaggaagactctgaggttcctagggtcagactagtgactccctgaaaagacagggtttggatttggtgaatgaatacagtcacgtgccacttgacgatgggaatacattctgagaaatgtgtccttagtgattttgttgtgtgaacatcatcgagcgtactgacgcaatgatgtctactagatggcagagcctactgcactacctaggctatgtggagtagcctattgcttctaggctacaaacctgtacagcatgttactgtactgaatactgcaggccatggtagcacaatggtaaatatttgtgtaactaaacacataaaagggacattaaaaatttctgtattataatcttatgggaccgccaccatatatacagtccatcgttgaccaacatgtcatttatgcagcgcatgactgtactgagctcagtttggaaaggctatacatgatgtgttagggtaaaaccagatagtgatgttgaaaggaatttggaaacaaggaactagaagtttgggctggagagaaaatgtgggctcctgggggtagacatgagagctggagccataggtgcaaatgagttcaggcagtgaacaccctgtccatgtgcccaaggagttttgcacagtagctgagcaatggcaagcaatgtgggtattcagaggtgtggataaaatcctctctccctcccactctgtggaagagagttgggttcatttaatctcatatgatttccctagtacaatagtttcaaatcaaaggcaatgaagtaactaacaaaataacttgtttgtaaattaattgctttgtgaatattgatacaaagttttataataccactgggattttttcatttttcatgaagaaatcagttttaactaggagaaaatcaatctttcatttttcttattatacacacttagagaaccaaagggttgttttgtaccccctatggagttccttggagagtaaaacaatgcacacattgtgtgtgtgttcatgagcactcttttggctttttctcctcacttttcttcttcccattttttttttttgctttcttttttttttctccaaatgttaggcatttaggttagattgggtttatcttgtctatcctccctcccttccttgcctcaattacttctttagattatgggtgcctttgaatagcaatgtaagtttagaaatgatgcatatataaaaatctactaaccagggatctaaaggttttagctggtagactcataagacatgacattgcttttatgaaaggtgagaaaagtggtaggaagtactttttttttaaatgccagaatttcttagtaaaacatcaaatataactaaaacctaatataaacattgcaatttttagacttttgcctcttgtgtcacattcatgtgctgtgctaagctaacacttatcattgtttgattacagaaaatgtgtttaataagcactatcaatgattacaaactcaggacatcttatctttccatcactctgagacctttgtggaggtttgtggttacaagtctgagttaaagaaaataaaattacatttctgatatcttgcacgctctgcactgagtgggttctttaaatgtttcctccagaggattttcaaccaggaacaatacaactgcttgcaaagagtcccagcaggatgggtctgggcatgagcatcttatactggtgaaatgaagtagtccagatattaaaagcatcaacttgcaaatgaactcatctgcactatagtgcaattctcaggtgaatgaccttttcttcagaaattttcttaatagtcccccaaaagaagaagaaaatgttcttgtgctttataaattttgaaaacctaaagagatcacttaatataaagatttttattttactcttgaaaacattagtctattgatatcaacagtaatattataaaaattattattattattattttttgagacggagtcttgctctgttgccaggctggagtgcagtggtgcaatctcggctcactgcaacctctgactccctggttcaagcgattctcctgcctcagcctcctgagtagctgggattacaggcacacaccaccacgcccagctaatttttatattattagtagagacggagtttcaccatgttggccaggatggtctcaatctcttgacctcgtgatcctcctgcctcggcctcccaaagtgctgggattacagggcgagtcactgcgcccggcctataaaaattattgttagcagcagttaacagtcttgagcctctactgggaagaatatgccctgttagacacagtattctatgtgatgaagaaaatatagtacctgttctccagactgattataatctagggtttccaataaaaagtaaacagatatggtagcaaaacaaaacctcatgtttaatattcagattttaagactcatcaccaggatccaagaccacatattcctttttgtgattttagtaacatattaagtgctaaaagatataagatgatgtttatatcacaaaccactaacatgctgtgtttataaaacatcttggtatattagaacaaccattggtccaggggttcttgtcctggtcatatattgggcaaatgtaatggctgcgctttgggacatccaagtgagcaaccaggtttgttgctcacttggatggaacaaagttgtcctgccctccacagacatataagagccaagagaattatcaactgtctaaataagtatttatgaacccagtggatatttgaaggtaaagaaagtttttctttaaagctcagacagataatttccattagaacatgacatctcagttggggtagtgtcttgtatgcatgattgtgtatcttcatacacttgtttccagaagaaaagcaataatgtggcatagctaactctgggatcatgccccagctatgagctatgtaatcctgggcaagatagtcaccttttctggctctagtttaatttgataaatgcaaatggaaaatgcaaaatgaaaggtttaacttgtcatttctagaagcccttttggctcttatattataaatcctgtgcttcatctcctcagatttaaaatgtcaccgtctatatattcatttgttcgcccatccaaccatgctttcatccatccaataaatactgattgcagcttacaacacaccaggtattattgtagatacttgggatggatttgtgaataagaccaacaaggtccctggttttaaagcttagagtggagtagccagacaataaagaagaaaacaatcagataaaccagataatttcagacagtgataaatgctttatgtcagttaatgtactagataatgacctggatatattctttagattgggtggccagtggtcactgaagaagtgtcattactcttgaacgatgacaaagaagcagccatgtgaaaatcagagagaatgttctaggtggagaaatgagaaattaaaagccctgggaacctgctttgtgtgtttgaggaacagaaagaagggcagtgtgactgtggtgtagtgtgtgactggtataaaatggggagaggtaggagaggtcatgcaagtcatgggaaaccagggtaagaacttagattttactgtaagtggaatgagaagcacctggaggttttataagcagaacaatgactctattggattatgcatgtaagaaggtcattctggtttctctgtggagaatggattgtaaatgggcaggagtaaaagcagaagctcttgtagtcccagagagagatgacaatggtttggaccagttgaagctgagatggaggagaagtggatagattctgttggacataaaacagaggtgctggaaattaggcgttcttcctgctcacagatttttagcactggtcctgtaacactcagttgttagtgaccactgtctagcttcctgtggttgcctgcttctattatacttctgttgattgttgctagtgacactttgactgtggattgaaccaaaaatctttcatgcacccaggaagctgtgtgacctcgggcaaataatttaatctgtctgggccttcagttgtctgtatgtacacaaaagaggtcaccagatctgactgtgtatgatgctgagaagaggttgaatcatgttacaggaaacaaaaagtgtaaagctgagggtatttataggatgcctgaaacatgaagtgttgatgaaatttattagcaatggaaatggtatgttaggaagcatgaggagcatatcaaagatagtatgagagaggatgttttggagaagattttatattaaaggtggtatgggaagaaaaggcaaacatgagaaaaaggaagaaagaacaagaagagagagattggtaaggggaacactgacaatttttaactactggtatggcaacagaattgaccaaatagatttgacaccttaccaatcagagcagacactatctataaaagtggtgctatctatcataccagcattccaggctgagtattagacttggagataagaacatccaagaaggatggagaaaagatcctagatgcttttgcagttataagaaactaatgtattcagatcttccttaaattgtctatccattaaatgctttagtcatggttataaggggcagtctcctttaatactattttcaaatgttaccaaaggctaagaagaatttgtaatttgtcatttgagcattgtcttagtccattttctgttgctatcactgaataccggagactgggtaatttataaagaaaagaaatgtatttcttacagttctggaggctggggcctaagtctaggggtctaggggcctaggtctaggctgaggcctaggggcgaaatctggtgagggccttctttctggtggggacactcatcagaggcccaaggcagtacagaggattacatgatgaggaggttcttgagagacagccaatctggctgtttataacatactaactctcatgataattaacccactcctgtgataacctattaatctgttaacccattaacccatgaattggattaagctattcatgggggttctgccaatcatctcttaaaggccccacctcccaattctattacactggggattaattttcaatatgagtgtcagtcagagggggacaaacattcaagctatagcaagcatatctgttctatatctgccaaaatagttatgaaataattaattaaatgctatagttaaaaacattcgaactgcagacttagagctgtcaagcggttttccagatggaaagtttaaacactggatatgtggaaacctaagtcagccttctgatcactacatttcataataaataggcgatccaggtagtttttaagttaaagataaaaaaatgagtaattaagagcgtccaggccaggtgcggtggctcacgcttataatcccagcactttgggaggccaaggtgggcggatcgtgaggtaaagagatggagaccatcctggccaacacggtgaaaccctgtctctactaaaaatacaaaaattagctgagcatggtggcatgtgactgtagtcccagctacttgggaagctgaggcagcagaatcgcttgaacctaggaggcagaggttgcagtgagctgagattgcaccactgcactctagcctgctggtgacagaacaagactccatctcaaaaaaaaaaaaaagagtgtccaatagaaatgacactctgaaatcttcagctgatgtcagtggcacacactctcaacatgccattcaagaaaaattgaggcacggcattcctggtcctacctaaatacttttgtgggcaagaaagacagtctcctttattttaatttattctgactttctggaatagcccattatgatattgagacagaaagtggttaacaggaacattgttttccctttggaagacttacccaacagcaaagaattagctctctcagttgtttgcagtcttatctggatatattctgatgctgaatccagagaaagcaggtgttagaaataacattaagatgtttttgtttcacttcttcatttcacggatgaggaggctgaattccacaggggtaccctagccacagagccttgctagtggcagagccagaatttgcctctggtttccttgggatccactgcaatgcacttccaccacactgcaccgccaaccattcatgtcctcttgtgtttgccacagtgcgggcacaatgggggaaaaatctgctgagaaaatcatcttcggaagtagaagacaatgcgtctatgtctgtgtatacatggtgaccacagacgctttggctccaagatcattgtggtttacttgctgccattctaaagtctctgggaaattttttgtgaacatttctaaaggaactgagaacccgtccactgattttatcttctgcagcagacggtagagacatacgcatcaaagcaacagtggggcaacatatttcactgtcagacaaataaagccccaagcaaaataccctacgttttaatctaatgtagactgcacctgttctcatgccaacagtttttttttctttgcctctggataatattgttccttccagtttttaaaacgaagcaagtattattttccttctgtatgcttttaaacatacttgttattataaaacaaaacatacatatagaaaagtgaaaaaaatgtataatttaatgaataatgctaaagcatactatcttaccctcataatcaccacaggtcaagaaatacaagactgtcagcacccctatttccttctgattccaactctttctccctctttagacaaaaccattaggctgaattttgtgatactaattcagattatattaactatttctattttttagtaattatggaagaaatcaaaacatgtatacttcacttagaaaagtttcaaattacatataccttcactatctttctagacaatgtgctctatattgacagatgtttcttttagcacattggaggtatatgttataattccactgtatcagggcttttattgttgatgttgaaacagtctaatagttgctccttggaaggtaatcagtctcttttctctggctgcttttaggattttcactaagatacatctaggtgtgcatacttttaaaaaatatgcttgtgaattgttgggattcttgaatctgtggagtgtgactgggttctaactaatttttccaacctatctgctggttcaccaattttctctttaactctgtctaatatatattaaacttatctattgagttttaaatctcagtgcatttttttggccgattcttgtaggttctttttcaaattagttgacttaaattttcctgtgtactacagatattattacaagtttttctcttatttgcttaaacataataagcttaattactttattttggggacctgataattcaggtatataaatcatgagtttgtttttgtagtttgttgtttctgttgttcccttgttttcttgtatgtctcattatttttgtgatgtgtttgccattgaatgtgaatattatttgtatgaaattttttgaggcctaggatgtaaaccttttcttcttgtaatagtttgcatttttactttcaaaagctgaagggtaataataatgcaaatctccttaaagaaaattcaaggattgaggttttctaaccattgaagtccagaagatttttctggaccatctaatctgaatgaggtctggtttatttctttacctgtgctccaagaatgtaactctttggggtcccaatttattggggagagggttttctgctagatcactcactctgcagattctgggagttgagacataaaaacaaaagtttgaatttgaaagaacagcaatgctttccgagtaaaagcagcttccaagctttgcctgtctctcggggttctggttctctcttcaaatttagcctggtaatttctcctcctttgtgtcattctttaatgcttttaataatatttttggacatttgttcaacatttttggttgttttggcgtgagaattagtttgaataatagggactgctataactgaagactagaacacttgtgcttattttcacaatcaaatcacccaaattgaagatatatagggaaaatataaattgaagcccagggtcattaagaaaataagtaattgtgtatcttaaataaaattaaggcaactagtgtaagtagaggtgtgacaaatagcccctcctgcataatgctaatcctgttacaaatttcagaaagcaaaatggcaatacatagtattataacttttaaacattttgaccaaatgtcataatatttacataaaagcaaaatgctgaaaataatcccaatatccaacgttagtattttagttttaacaaattatgatagattaacattttggccaataatatagtcattaaaaaggataattatgatgactaaaaatgaaatgtttatgacataaaataacaatagcagaacacaaaataacatgtttgctataaataataagtatgtttttgcaagataaagagcaaaaatatacaaatagtatttctatttcactgtagaactaggtaatttttttccttaaaatttttttacacttacatagttttctcaaaaacaaagaccaagatttcaaaacttaggaaaaaaccagcatactaataattttcccaaacaatttcagcatgaaaatttgtcatattaaaaaggaaaataaaacaaaaagaaagagaaggcaatgagcagtttgaatttatagtctaataactcagaatctgcaaccaccaggccaaggtgatttcagttttttccttctgtgattcccatgtagcttgcaaaaacaaccatggcttcctataagcataaatttatttcagaaaatgaaaaagtggggctgggcatggtggttcacgtctgtaatcctagcactttaagaggctgaggcaggaggattgcttgaggccaggagttcaagaccagcctgggcaacatagcaagacctgtctctacaaaatttctttttcaaagttagccagatatggtggtgtgtgcctgtattcccagcttcttgggaggctgaggcaggagggtcccttgagtcaaggaagtggaggctacaacgagctaggatcatgccactgcactgtagcctggggaacagagtaaacccttttctctgaaaagaaaagaaaagaaaagaaagagagagaaaaagtaaacaaaaatctggggctttatctttattatcaggccttgattcagttctcagtggatgaggtttggagaaaatacatttctgtcatttgaaaatgattagtctgttcttttactctttagcaggaggacataatgtatgtgtgtatatatgtatgtatatgtatacaattatttgtatatatacacacacatagtctctctatattgtaatatacatatacatataatacatatattttaatatataatatgtaatatacatacatatataaaatatatatacaattattcatttttaaactacttcgtacttttacaaagtgagcaatttctatctttccttttatctgctttactgatgtacatcagtgattatttactcatcagaagtacacatggttcttgtcagagtagtttgatcaacaggtagacaattccttctccccaagatatacctactaataaatgaagtttttcctaaacttcaacttttcccatatctctctgtttagctaagtgctactaatcctttaattccaattttaaaactcacttcctcaaggcggcattttctgattctataatcaaaattataacccacctgactctaccaccttcatttaaatagtactccattcctatcacaaattatgttgcattactacatatttattcctttaccatctgcctccaatatgaaagctaccaaaggacagaggccataccagtttgattcatacacactatgtaaatatattatttaatatttagtatattctatattcacatatgacaagcaagtttctggttaggatttttttttctctaggacatagttttatcttatgttcttccttgaggggtggagggagaatgtgaagctgtttcattttggtgcaacagagatgactttatgcattgaataaattgcttttatgttaaaatataattattagggcaacattataaaatgtcacttttgctttgttttctttctttttatgcaggagaaatcaatggttctgccaattatgagatgtttatatttcacaacggaggtgtacaaattttatgcaaatatcctgacattgtccagcaatttaaaatgcagttgctgaaaggggggcaaatactctgcgatctcactaagacaaaaggaagtggaaacacagtgtccattaagagtctgaaattctgccattctcagttatccaacaacagtgtctctttttttctatacaacttggaccattctcatgccaactattacttctgcaacctatcaatttttgatcctcctccttttaaagtaactcttacaggaggatatttgcatatttatggtaagacattgctttcatcttccaaacttaagagtatatatatgttttgacaacttttctcactaataaaatcaattagacaaataaatatcttttgtgttggagttcacttagatgcagttgatggtaatcatttataatgaagatatacaggtgatgatttactattaatcataattagtattattcagcaatatgcaatgtaatcccatagactgctaagtcagaaatagatcatattgccttttaaacacatatgctattaaaaatcaggaaaaacattaagacaaatacttaaacttatggcttaataatgggtattatctctattcacctaagatttaaggtttggttttgcactgtgtttgtggaatgaagtatgatgattgaaaatcatagttttataacattacttttactattacctcttttataaaaatataggcagaaaagccctttctattaaccacatttgtaaatacattatatgcataatcttttaagttttagttcctggatccttgccataatactgagatgatgttagtctaataacttgcccacttactggatttcatgactataataaagaaaagcttcatttgattaaatagctcttttaaatttggtaagagaacttgtggttcagcagaatttttcattaacatacctttttttccaatccagaatcacaactttgttgccagctgaagttctggttacccataggatgtgcagcctttgttgtagtctgcattttgggatgcatacttatttgttggcttacaaaaaaggtaagcgatttctatctttccttgtatctgctttacagatgcacatcagtgattatttcctcatcaaaagtacacatggctcttgtcagagtaatttgaccaacagggagacaattccttccccccaagacatacctactaattaaactaatcacttggaacagaaatttatgtatttgttttatagcccacacattccaaagaggacttgacttgatggcttacagagagttacattattattattattgttcaaactagatgaggaaattgaggtcaagagaagactaaaggtcaggaggaaggttaaaacatcaaaatagatgactctgatttttaaaaaattattatgcatgggctgcgaatttgaatccaaggttcctgagaggcagggcagagatgaaacaattagttataagttttgcttagctggtaagttaaaaacagtcagcaagaaagccttctaaggtgtcaattgtagctgagaaggaaattgacaacttttttacatggtaggttattagactccttgcttttaaagaaaaccactgaggagctatttagaaagataaacaacaatgacaacaacaaaaatctccctgtgctgggggatattctttttggtctcttgcattacaggttctcaatcaaagaactgacaccactctgcatattacgcgagtatgctagtactcaagtatatccacagtgtggtcattggccagtgtatatctgtgggagagtggaatttggaaagagacataaagaaggaagagaatgagatagcgcccatggtctaagtctgctgggaaagaaacaataaaggcaaaaacgaggaagaaagttcagtagaaagctctttttatgtaaagcccttttcatattgtttttctacttagcctaaagccaggaacctaagtcacattatcatgtttttgtcacataccacttcaacaaagaatagaaaacagtcaaaaaacaaagagatggagaagaaaagatgaccaagcatgtttctggctttttctttcagaagtattcatccagtgtgcacgaccctaacggtgaatacatgttcatgagagcagtgaacacagccaaaaaatctagactcacaggtatgactccatttgggggtttgggaagggaagaggtttcttcacagtaagcctggaatgttaatttttttttttttaattttaaaggaaaggaaaacatctccaaggcctaattctagaattttctgtgaaaatctggatttctcacttttaactagatttatattttctgcagtatattgaaaacaaacaagcaataggtttgtaagccactattgaaactaaacacacaaacagctcataaaccaccatagtatcaaggcaattttcccattgatgtttcaaaagttgggatgattctaagtgttttttgttgaagggttcattcagtcattcaatgagcgtttattgagcatcagttaagtgtgagttactgagtgaggcactctggggaatttggacagatatatgctaattttggactgagattaggaagagagatctgtgctggtactgctagagggaagaaggagaaattgatgaagatatctggttattttgaggtaaagagtgtgcaagtttagagaacttggatggctttagaagtctcagtaacatggaaatttgaccttttctgttaagagtcagaaaactgaaagttgccaagtttgaggagcacccagaaagtttgaagcttccattgtggaaaattcatgtcttatgcccttgaggttcgaatgatgtgcgatgtgtaatgagacagaagccactgcatttttccacccctcagtggctacagattatctaaaggggacacacatagcttgcgttgtcatggaattatagcatgggatgggagctaaaaaggatccttgagttcacatttcatgttttagatgacagaaattgatgctcaaagtgttcagtgactcttttggttccctagacagttaatacctagctttgacacttgcaaagagcttatgtttcattactttgctgtttaaaaaatatatgatctctcaatctctttgcttaatgtgttctggctgtttggatccccacaagcagaacctgacataaggacttgggtgcaagtagtttatttgggaggtgatcccaggaagaaggggtgagggggcagggagagtgagacagccaacaaggagaagcaaatgaagggcgcattattatcaaggtctcagctccaggccacagaggcctgacttcattggacctctgagaagtgtacagatgcctcccagaatcattctcttgaaggatggcaaccactggctccatcctcactgatttggggttgcctgcggagggcattagctttccctcatctctgagctgtgcctctacttgggatgagcctacttgggatgagtcttcagagaaagtctggaggcagaaaagcagtgaaatgcagtggggctgttgtgctagaacagtcagcccatgcagcgctttctgccccagcagcagctgcaatcagaggtggacagtttcaaagtgatgagtttagataatgtctgttataggagtcgagagctaaacttctctggaaatggggaactggtgctgggtgttgaagcataaagatgagtttgcatggtgtgtgtgtgagtgtgtgtgtgtgtgtgtgtgtgcacgtgtgtgtttgtgtgtatgaaaggcaatggagaggggaaagcttcttgtagggaactggcacatggagagcatttagataatttatgctgaatttttgttacagatgtgaccctataatatggaactctggcacccaggcatgaagcacgttggccagttttcctcaacttgaagtgcaagattctcttatttccgggaccacggagagtctgacttaactacatacatcttctgctggtgttttgttcaatctggaagaatgactgtatcagtcaatggggattttaacagactgccttggtactgccgagtcctctcaaaacaaacaccctcttgcaaccagctttggagaaagcccagctcctgtgtgctcactgggagtggaatccctgtctccacatctgctcctagcagtgcatcagccagtaaaacaaacacatttacaagaaaaatgttttaaagatgccaggggtactgaatctgcaaagcaaatgagcagccaaggaccagcatctgtccgcatttcactatcatactacctcttctttctgtagggatgagaattcctcttttaatcagtcaagggagatgcttcaaagctggagctattttatttctgagatgttgatgtgaactgtacattagtacatactcagtactctccttcaattgctgaaccccagttgaccattttaccaagactttagatgctttcttgtgccctcaattttctttttaaaaatacttctacatgactgcttgacagcccaacagccactctcaatagagagctatgtcttacattctttcctctgctgctcaatagttttatatatctatgcatacatatatacacacatatgtatataaaattcataatgaatatatttgcctatattctccctacaagaatatttttgctccagaaagacatgttcttttctcaaattcagttaaaatggtttactttgttcaagttagtggtaggaaacattgcccggaattgaaagcaaatttattttattatcctattttctaccattatctatgttttcatggtgctattaattacaagtttagttctttttgtagatcatattaaaattgcaaacaaaatcatctttaatgggccagcattctcatggggtagagcagaatattcatttagcctgaaagctgcagttactataggttgctgtcagactatacccatggtgcctctgggcttgacaggtcaaaatggtccccatcagcctggagcagccctccagacctgggtggaattccagggttgagagactcccctgagccagaggccactaggtattcttgctcccagaggctgaagtcaccctgggaatcacagtggtctacctgcattcataattccaggatctgtgaagagcacatatgtgtcagggcacaattccctctcataaaaaccacacagcctggaaattggccctggcccttcaagatagccttctttagaatatgatttggctagaaagattcttaaatatgtggaatatgattattcttagctggaatattttctctacttcctgtctgcatgcccaaggcttctgaagcagccaatgtcgatgcaacaacatttgtaactttaggtaaactgggattatgttgtagtttaacattttgtaactgtgtgcttatagtttacaagtgagacccgatatgtcattatgcatacttatattatcttaagcatgtgtaatgctggatgtgtacagtacagtactgaacttgtaatttgaatctagtatggtgttctgttttcagctgacttggacaacctgactggctttgcacaggtgttccctgagttgtttgcaggtttctgtgtgtggggtggggtatggggaggagaaccttcatggtggcccacctggcctggttgtccaagctgtgcctcgacacatcctcatccccagcatgggacacctcaagatgaataataattcacaaaatttctgtgaaatcaaatccagttttaagaggagccacttatcaaagagattttaacagtagtaagaaggcaaagaataaacatttgatattcagcaactg

SEQ ID NO: 25 - DNA, 2609 bp, Homo sapiens
ctgaacgcgaggactgttaactgtttctggcaaacatgaagtcaggcctctggtatttctttctcttctgcttgcgcattaaagttttaacaggagaaatcaatggttctgccaattatgagatgtttatatttcacaacggaggtgtacaaattttatgcaaatatcctgacattgtccagcaatttaaaatgcagttgctgaaaggggggcaaatactctgcgatctcactaagacaaaaggaagtggaaacacagtgtccattaagagtctgaaattctgccattctcagttatccaacaacagtgtctctttttttctatacaacttggaccattctcatgccaactattacttctgcaacctatcaatttttgatcctcctccttttaaagtaactcttacaggaggatatttgcatatttatgaatcacaactttgttgccagctgaagttctggttacccataggatgtgcagcctttgttgtagtctgcattttgggatgcatacttatttgttggcttacaaaaaagaagtattcatccagtgtgcacgaccctaacggtgaatacatgttcatgagagcagtgaacacagccaaaaaatctagactcacagatgtgaccctataatatggaactctggcacccaggcatgaagcacgttggccagttttcctcaacttgaagtgcaagattctcttatttccgggaccacggagagtctgacttaactacatacatcttctgctggtgttttgttcaatctggaagaatgactgtatcagtcaatggggattttaacagactgccttggtactgccgagtcctctcaaaacaaacaccctcttgcaaccagctttggagaaagcccagctcctgtgtgctcactgggagtggaatccctgtctccacatctgctcctagcagtgcatcagccagtaaaacaaacacatttacaagaaaaatgttttaaagatgccaggggtactgaatctgcaaagcaaatgagcagccaaggaccagcatctgtccgcatttcactatcatactacctcttctttctgtagggatgagaattcctcttttaatcagtcaagggagatgcttcaaagctggagctattttatttctgagatgttgatgtgaactgtacattagtacatactcagtactctccttcaattgctgaaccccagttgaccattttaccaagactttagatgctttcttgtgccctcaattttctttttaaaaatacttctacatgactgcttgacagcccaacagccactctcaatagagagctatgtcttacattctttcctctgctgctcaatagttttatatatctatgcatacatatatacacacatatgtatataaaattcataatgaatatatttgcctatattctccctacaagaatatttttgctccagaaagacatgttcttttctcaaattcagttaaaatggtttactttgttcaagttagtggtaggaaacattgcccggaattgaaagcaaatttattttattatcctattttctaccattatctatgttttcatggtgctattaattacaagtttagttctttttgtagatcatattaaaattgcaaacaaaatcatctttaatgggccagcattctcatggggtagagcagaatattcatttagcctgaaagctgcagttactataggttgctgtcagactatacccatggtgcctctgggcttgacaggtcaaaatggtccccatcagcctggagcagccctccagacctgggtggaattccagggttgagagactcccctgagccagaggccactaggtattcttgctcccagaggctgaagtcaccctgggaatcacagtggtctacctgcattcataattccaggatctgtgaagagcacatatgtgtcagggcacaattccctctcataaaaaccacacagcctggaaattggccctggcccttcaagatagccttctttagaatatgatttggctagaaagattcttaaatatgtggaatatgattattcttagctggaatattttctctacttcctgtctgcatgcccaaggcttctgaagcagccaatgtcgatgcaacaacatttgtaactttaggtaaactgggattatgttgtagtttaacattttgtaactgtgtgcttatagtttacaagtgagacccgatatgtcattatgcatacttatattatcttaagcatgtgtaatgctggatgtgtacagtacagtactgaacttgtaatttgaatctagtatggtgttctgttttcagctgacttggacaacctgactggctttgcacaggtgttccctgagttgtttgcaggtttctgtgtgtggggtggggtatggggaggagaaccttcatggtggcccacctggcctggttgtccaagctgtgcctcgacacatcctcatccccagcatgggacacctcaagatgaataataattcacaaaatttctgtgaaatcaaatccagttttaagaggagccacttatcaaagagattttaacagtagtaagaaggcaaagaataaacatttgatattcagcaactg

SEQ ID NO: 26 - protein, 199 aa, Homo sapiens
MKSGLWYFFLFCLRIKVLTGEINGSANYEMFIFHNGGVQILCKYPDIVQQFKMQLLKGGQILCDLTKTKGSGNTVSIKSLKFCHSQLSNNSVSFFLYNLDHSHANYYFCNLSIFDPPPFKVTLTGGYLHIYESQLCCQLKFWLPIGCAAFVVVCILGCILICWLTKKKYSSSVHDPNGEYMFMRAVNTAKKSRLTDVTL

SEQ ID NO: 27 - DNA, 13407 bp, Mus musculus
tgatttcttctctccagcgagctccgcagaagacacaggcgctggttgctgggtccgctctccgcctccgccgcgccctcctcgcccgggatgggcccccccgccgccaccgccgccggagccctagtctccgggccgccgcctcggtcgccgcgtttgccctgaagcccggtgcccgcgcgccccggctcaccccgcagcttcactccccacccccagccgcctccccggccagactgcggtagagctctcaggatgctgccgccggtgccctcccgcctcggactgctgctgctgctcttgtgccccgcgcacgtcgatggactgtggtggtgagtgctgagtgggactgtctcccgcgcagctccaaacaccagagggtggggacccagagccagtcttgggacttggcacagcgatcctgctgccttcaggctctacccgctccaggatcccagctatcgggaggttgcaccgggaccctcgcagacagttcctttcgggtctctgcccgagcacttctgaagtgccactttgacgttctgtacccctggatactctattgtgttttcttcccgtatagtcttccttcccccaaagaaatgtgtccaattcgcatcatcaaggagttggcagataggtagggaagagctgttggacatcatgaaatccatagtgagagattgggtgagaacggggtgaggaggggtggggacgggcgagaagggccctcgagctagatttggggaacagacaggaacaaggtggaaagctctaagacagagagagtcaaacggctgcctcttgcccgcgcctcattgcctaccacctcaccattgctggccccttcagcattggcagtagtacaggaatagggaatgcaaatggggaaactgagtcaggactctgacttctctgcttttcccatagcgagtaagaaagacagaggggagatcccggaggccctctcttccagaactgggaagtaaggaatttttttttttttttaatgtgtagcggaggaggtgtaggaactcttgagagcgatctgatgaagccagtaggagcctggccagccgagagatggggtaaattctcagatccgaactctgggatttagccagagcagacacctagacttcgagggtttccaaagctttgagccttgaggggaaggacagaggaggggcagcgggggtggggggcgccaggacaactcagatccaaatcttcaagacttttttcctcttagttttttagagccacaaacacccgcccggaatagttcagtgttcagagaggaggaggagggatttgggcaagagtgctgatagattagccaaccctaagaaagcaaggacttctacatttgcatatagccccgccattggctgaatttctaccctctcagccctctcacccgccttcgcggctttggacccaggggtggggcaggcccatccctctcttcaacagagattgagtactatgcccacacaggaagctgctggccgctatccttccgcgacgcgggaaagacatcctcgtgggtgtcagtgagagggctaatacaagatccaggttcgggttaggaaacatgcgccttgagttcttgctgcaacgcagtatttagcagttttgacagatgtatctaatcccagtttaatctgtggtcttgggtgaatcattttcccaccttgacctacaaactctcagcttttaaagaacaatctccctatgtggcaggcttgccaggagggctgtgggggaagatctataaaatgatctgacattaggagccctcttcccagtccagcctctcatctcccaggtctccttaggatgaaaagtggggttactttcaattcaaaataaagagtaaaaaataaaaataaagtaatgtttggccgtgagctcgctcgctctctctcctcccacttacacacctttcataattttgccccttttcaatatgtaggacagtgctatcctttctctctcgttcttcctcccccattggtctaaattgttctttcttacaattaaaatcccacttcctccatgaagctgtcattctccccaccaccaccaccctgtccttgaggctcccattatgccctaagcaactatgcatttaccgcactttactgacaattgtcttctctggaatgtttttgccctgttcctggaaggcaaagcctttgtctggagagccctagaagccccggttagtctaggtgctggacacaggtttatggagtgttgctttctggatttgtatctgtgaagatccctttgttcaggaaggactgctgggtgggagccaagccaacggcagaggggcctgggccctccggagactgaccctgaggcttcgaatctgggagtgggggaggaggtgaggagggcaggtgtgggagaacacaggggccttcatggccacagctgcagtgaagagtgagaggccagggtgataagatgaccagcgaatgcttctctcagatgtgtctccgagagaacctgctcctcccacctgcctcggcccctctctgtctatttctgacacttaattcctttggtctgagcccaggctgactttcacatggtctttgcctctctgctgatgctgctgtcctaacgtaggcctcctggtatgggctagcgggtagatcgtgttgggtggttagcttgaagttcttgacattttctaccctacctcctccctgttagagctgggttcttcaggactggggttcaggccctgcatcactgaccaccttctttcccttccttctcaggatgatggccaggccagaaactccatgggtggtcagcaaagcagtgtgatctatggcagccatttccacaatctagctgtggtcaggataggggccaagaggactccagggcctctgagtgacttgactgcccaggtcactaaaagaaggtcctggagagtggcccaggccttggattcgctcagggaccaggctgctggttccaaagaagtttttctttcacctttcttttccactccacctcctcccagtgcaacgcaagatttctatttttaatttttcttgtttagttttgagacagggtcttgctatgtagcaaatgcatgccttctaaactctgccgccagcctctgtgtatttctccaatgtaaccatatctttgtgaatcacagaatccaagattccaggacactggccaggccctcttgaggtcatcttgttcagcccctgcctccaggctgtccaacctatgcaagaatcctgtccagagaacgaagcaggaaagagactctggctcccaggtcaccagctcaccctcctcctctgctccctgctcccctctccacgtttggtccatcaaaagccaaatagatcatctcccttctctcttcctcttccctctcgatgttttacctttcctgtgaaagaaacgtatctgcccccccccagcccctgtccactaggaagaagccgcctaatctgcccctagccatcccactttgtctcccccccttatggaaaagaagccagagctaaaggttaaggacagcctcactgctgaccccacagggagacaggaaaaagaccagacttcttcctgatgctcaggttttctagttactctctgccgtacctttgtgtgttcacgttggtcctggtcgctaggccattctgtcttgatctggggctcctgacccttcctggtcaatgctgatgctggctctcatcaagccctagagtagggatggcttgggggtggggtagctatccaatcccttcccaggcctcactcagccttggcagcttccccttcagagagacaatgaggctgtgagcagaaaagggcaggggcaaaaggaggctggcttgatcccggccagagcatgccctgggcccaccagagtcctggcactgtgacatttcctggggggtgaggctcccttctgccccattctcatctgaagccaggagttggtggctggaggtcagagggaggccccatcaccagggcccagcaagggggattccagaatgtgtactttgatggggaagtgcagctgtggagggaatggggcagggcagcaaccagcccaggccagccagcaggaggcctcgggaaccagatgcccgctctctgcagactggggagagcgccccctagcccggtattttttttttcctggtcagctgggagcgtgtgaagagaactgtggccaggggaggcatctttggctggttctatgagctctgaggtctctgtttaatctagaatttgatctggaaaggactgagacataacctagtctgttatggtcactggtgagtgtagaagatccagggacaggaggggacttgcccagtgctaagtctgcgtgttgggagacagtggggctgagtcctgctccttttcagtgtgtggtgagaatgggaatctatccggatgagggccagggcctgcacaggtcccattgctctccatcagacaggtgctcttcattctacatgcaagagcagaaggtagggcaactgcccactaggtgtccagtggacagcattgttcccagagctttggccagtgggaaacccttttgcccagtgaggtctgtctgggaggagaagccctgcctcttggaaaaacaaacaaacaaacaaacaaacaaacaaacaaacaaacgagacagaagtgagagggacgacacagaaaaccaaatctctcctgtgtgaggaaggggaatgggggccacaggtgggcagtggtgaggcaggggttaatggagctggggcatcactggctttgatgtggtggtttgggactggggtagggactgggggaggggagcagtaattaccgagttaggagttagacagagcaggacaggacaggcgggcgggcacaggcccggcagcctcagcagccgtcaggcaacattttttctgccccctttccaccatccacctcccccacccccaccccctcccacccacagccccagggctcagagctccctctgctggctcctaggaggtggggtcaatggaagtatcttgggggtgggggtgggtaaggagttagggcagggagagagaggcaggcatgcttgctgtgaggttttccaaggaggtgaagaagcactcacgtggtgggtggtccctttggcctcagtgagccagctggactaggtgagggtcctagagggtgttctggtccctcggtaggctgaactgagaaggagacctagatccggactggacagaaaagacaagagtattggagaaagaacattcttgggactccacacataccaccaacatccttactgttaggcctgcatgagcaggcctgggaatacaagcacttgctaggatccactttctgtgtaggccgttatatgtggagggagggtattatcgtttccaccttcccattgaggaactggagtttaacttttatcatccacccaacaagtattaagtatgtttcacgtgctaggggctcactccatagcacacaagcaaatggcagaccccagatccatccccagcctgcatccctaaaaccctgagtgtgctccaccgatgatgacacgatacccatgtgtgagattcctgtctttaatgagacttctacctaattgtggagatgacaaggaatcatgggggcagggcacactcaaatgggtgacaactggagaatgctgctggggccaggctggtgctcctgaggacaagcgagggcaactggttggggatgtctggatgacttacagttgcagagtctagaaatgtagaggtgtggccagggatggcgtcaaaggcatgacagcaggggtgcactgtgtggaacacattgtgagaggccacctggggtcttcctgtgattcaggccaccatttccttctagccctgctttgggatttatcatttgatttgaataggactggagattgagcccacagcctcaagcatgccaggcaagcatcctatgactgaacttattaattttgagataggggtcttagtaagtttcccagacagtctttgagtttgcaatcctcctacctcagcttcttgagtagctgcaattacagatgtgtgccaccaactcaacccctgttggtagatgtttgtcattgagacgtggtcttaccttatagacctggctggcctaaaacttgctatatagaccacggcctgcttctggcatccaagggttggggtgaaagctggatgcaactatgttgggctctacttagattttaaaattacctgacttgctttgcaaggaggaatctctccagcaagaggccatcagcttcacacacgtggctcacctgtgtgaccctgaggtggctctggcgaatgagcaggtctctgacattttcttctgctctccgaatccaaaggtagaagaataactgaggcagaatcttggagtctctggggctcagatctatacacattgccagtaggaactgtctggcctctgatgccatcttatagaccattgacccatcagccatagtccttgagagaaaattctcagtgtaagtcacaacagttaaaatggccttgtaggcttgtcccttcctgtctgtgtactgagttcttttagggctagccatgttttctgtgcctagaagtgcaatgtgattatatcccacggcctacatagtatatctattccccactctcacatagtctaggcttcaaaaatacaaattagacaaattgccctaaaagtcttctctagactgaccccaggtcaacactaatccagactcccccaaagcagagctcattgtataaggaaacaaaagggcaggaagcaaagcaaaagagagggcatgggagaagagggcggagggagttgttctagaagtgaagtcagatcttaccacttggaggagaacacttgcatcaactcatgtctctctctctctttttctcctgaagcccagagaggaaactgactggtttggaatggctcagcccacccagaactgacaaaaactagggtcagaggtagggctgggtagtttgctcaaagcccctgtcatgtcttttctggagtttcattttctatgtatttaggatgggagtaaggacagggggcaggaacaagctggtcccttgggattctagtgttatctctgcccatccctcctcctgaccagctggtcaacagggcgatttcccaggaagtcagccagccccttaaccctgtgaagggccagccccacctcctgggggccctgtcctgcgtatcccatggttcctttcctatctctaacccctaggaagcagacaaggtcaagagggttctgcagttcttccttgcacgccccaaactcttttctgctttgctaggggaggggatggggtggggcagagtgaccttgggaagataagtccagtcaaccttgggaaagtagggagtgtgcagagggcagggatgggatgggggtggagctggggaacttagcagtaggagatgaggaaggcaaattttcagaaaccctcacagtcaggaggagctaaagcttgtaggtggtagaagggacactgaatgactgcagagaggcctgcttggttcctctcatctcagcgggaaggcggggagggggaaggtttgaggatatgacactaggagtcaggaaatgacaccaggtcaatgggacctggactcaaggggaggccttgtgactcactcattcagaaacatatgttaagtaatcattgttattacatatttgtatttatctataatgtagaattcatgatatgcaaattttcagaataaacattgcatggatatgaattggatactcagagagtttccagggaagatgaaggaggaagaggaggaggaagaggaggagaaagaagaagaaggaggaggaggagaaggagaagaagaaggaggaggaggaggaggaggaggaggagaagaagaagaagaagaagaagaagaagaagaagaagaagaagaagaagaagaaggaaggaaggaggagaagaagaagaaagaaggagaagaaggagaagaagaaggagaagaagaaggaggagaagaagaagaaggaggaggaggaggaggaggaggaggagaagaagaagaagaagaagaagaagaagaagaagaagaagaagaagaagaagaagaagaagaagaagaagaagaagaagaagatgatttccacaatgagggagctcaacattatctaccttccctgaacaaccacgccggaagccactcaaatccaaatcctttttaaatgaggtggctaagtgacagatttattaatgaagttgtacatagacagagaagtctaagttctttctgcagtgcagttttcagtttagattctagtaatgtggagacaccacgcagaatggaaaagaagcagtgtctctgtcagttgggagtgggatagacagggaggtggatgaacagagagagaccgagcagttcctgggccactgggccactgggccactgggccactgggcagtttgggcctggcctgggctcactgtccattactccatcagtcccttctctggggctgagagagggttagggctagtgttgggcagagcccaggctcagtacaaaggaacctctgccgtacagttctgctgagaaaggacacttgatccctgaactacttaagtagggataacggcaacttaaccccccatcttgtctgtgtgtgtctgtgtgtgtgtgtgtgtgtgtgtaaagagagagatctgtttaaaacaacaacaacaacaacaaccaccccccaggcttccatatctttctgcaaatacctccttgaacacaccatcttcagtgttgagagttttaccttaagacctaaattcctcttgctgctatttaagaccattgcatctcaggacatgcctgggcagcctgtacttgtggagtaaatggggacagtggggcggatatgcgaggaagcaaaactgaaaagtaggccaccctgacctttcacactcctttgccaacattttcctccacatagtataccccactgcctccctgtgtgcctccccgcctccctctgtctttctctgctctcctcagaaggggtttgaatggtctcagattaacctccctacctctgcccacacatcccttccagcctgagctctcagctatgttcaaataggagccatctgattcaggcggttccccccaggtgtgaattcctggctgacaacctatggaaaccaagtggcagctctctcctcaggtggaatgaaagtgggcaggggagaaaggctgctgacagtgtgcagaactttccctcgggtctttactcaccaaaccaaacatcaccccccttccattccccttttggttatgtcaccccagcacacagggcttggcttggcgccatctctctctgggaaagccagctaccctggaaagcagggtcagcaccacctatttgccaacagtactgaggaactaagatcccagatccttcttccagctggctagcccagggaaacaggggtcgcaggagaaaagagcccacctcagccgtctaagataaattttctcagtttacagaaatggttgaactaagaggggtgtggctttgaggggcgtggcttctttgaagggctgtgttccctagacattctaacacctcactgctcttttgtcccttagatggccattgctttttactgtaggttgcagcccaccaaggccaaatccttccttgatactgtctactttcctttagaatattctcttttatgaaatgtgctttttttttcagctttcttgaacttctgctaatttcttccttgtctccctttcgggctaggcttgttgaattttaaccttggcctcccttgcaccagctgccttcaccttgagtgatgttcctgtaagagtttattaattaagatgtgcagagaaggataagactggattcttgacataatgcaattttcagtctagaccttagtaaagaggggacacagacatggaatggaaagaggaccagagggacgccatcagtctcagttgggagtagggaaagactcctgcagcatgggccgagtggggctacctcttcttcaccccacccgcgcgccttgcatcttttgtgtttggggaggtgcacttctgacctgaagttctgcttcccagggccgtgggcagccccttggtcatggatcctaccagcatctgcaggaaggccaggcggctggcaggaagacaggccgagctgtgccaggcggagccggaagtagtggcagagcttgcccgaggcgcaagactgggggttcgagaatgtcagttccagttccgtttccgacgctggaactgctccagccacagcaaggcctttgggcgcgtcctgcagcagggttagtgtgggagaggccccagagggaggtgctttctccttgcgagggaaggagtttgggggaggttgtttgaactccatctcctgatttgcccctaggcaccctacccactttgcccctccacacctgcctggagtctgtctcccaggtggtccagcacagacctggaggggggatcccagttcccacctatggtaccgggcagtcactggcttccactcccttctccctccgcagacatccgagagacagctttcgtgtttgcaatcaccgcagctggtgccagccacgcggtcactcaagcctgttccatgggagagctcctacagtgtggttgtcaggcaccccgcgggcgggcaccgcctaggccctccggccttctgggcactcctggacctccaggaccaactggctctccagatgctagcgcagcctgggagtggggaggctgcggagacgatgtggacttcggggatgagaagtcaagactctttatggatgcgcagcacaagcggggccgtggagatatccgtgcattggtgcaactgcacaacaacgaggcgggcaggctggtgcgtatgggcagaagaagcaggcgttatgcatgcgtgtggaagtgtggatgtgcaagagagtgtgagcgtggtagcgtgggcacaagtaaaggtgtgaatgtcagagtgtgtcagcgtgtgtcgcgcggtgagcaagacaggggcaatttgggaaggctggggcgggcacacagatatacgtggcatgtgagatgtccagtggaggactgggagcttgacctgcagctgagaggaacagtgagcagagtggccaaaggacatttctagaatggtgctgagggccaatagagacccaaggtggggtgggcatcccattacagtggggtaacccttggggctggtagagaggtggatgtcaggacagaagcagtgtactgagacagggcctagggatggaattaagaatagatgctatggaacggtctgtagtctggtggtagaggtactagaaaaagtggaggttagagccagctctaggagaactgacttggaaaggacctgaaggaccaggagtccagtgagaagtcagtagaagcgaggataactcaggtccagcctcagtccagcaagcaaagaagactatgagagtctgttctccatagtgcagtcaagtggactctcctatatcccacatctcagttctagagtagttaaggaatagcacttcacactttctgtgtcctttagggttcaacctaagaatcaggcaaacggggaggagggggccgggagaggaatgtccggacaggcccacatacctgtagagaggattggggaggggtgacagagacagacgcccaggggtggggtggggggctggctgtgtctgctcagctctggctgggccgccaggggctggaatgaggaggccgggttggcaggagggttaggccgcgacagctgccacttcttcgcactccagggagaatggagaatctcaccactgcgtccattctattccctcccgctccctggcttccgaccctgcgatctctgctctatctactgttccctctctcactcctccatccttgtcatttttcctcctttctgagtggttcttttcttgatttcctctttctaaacttgtatttgcctgtcctctctccttccttctctctttctttccttccttcttcgcttgcttgctcgaccccctcccctccccggcttcctttgcgttttgtctgttccccgccgctctccgccccgcccattgccccgcccttctgctcccgcaggcggtgcggagtcacacgcgcaccgagtgtaagtgccatgggctttcgggttcctgcgctctgcgcacctgctggcagaagctgcctccgttccgcgaggtgggcgcacggctgctggagcgcttccacggcgcctcgcgcgtcatgggcaccaacgacggcaaagctctgctgcctgcggtccgcacactcaagcctcccggacgagcggatctcctctacgcagccgattcacccgacttctgcgcccctaaccggcgcacgggttcgccgggcacgcgcggacgcgcctgcaacagcagtgccccggacctcagcggctgcgacctgttgtgctgcggtcgcgggcaccgccaggagagcgtacagctcgaggagaactgtctgtgccgcttccactggtgctgcgtggtgcaatgccaccgctgccgggtgcgcaaggaactcagcctgtgcctctgacccgtcgcctgcctcggaactgctggcagccacctctgggccatctacaggactattagattccagcagggggcgctgtctgagtccagcagctccctaggaaaagtacctatccaggccttgggaaattacaggggccagccaggaacttggggtttacaccagcccacgaaagcccgggggaacattcccctgaaaggccctttgctagttcctgcaggagatcactccccttggccccccagatggaaataaaaaagccagactctgccctctggaaataatattcctcagaattactgggatggatgggtgagtttagtatcaataaagacatttaaatccacagtttgagaggaggtagtcctagagggccaggatatggaagaaagttggtcctggtagagttagcatttcagtctgagtctatcattccacctgttaccaaggcatgacggagtgagggaggacttatggaaaggcagaaaagagggtgagggagggctcctggaaacctttagcacaccttctgttctttcttggctctcgagaacttgtggtcccatgttaaaggaacacaaagaggccagaagcttctagtagtgggcttagttgtcaggcgtctgtgtgaacttttatggcattctgtctttctgtgactcctgatgaaattaacggtcatgagattaaaagctcgtcatgaactgtaaaatg

SEQ ID NO: 28 - DNA, 2064 bp, Mus musculus
tgatttcttctctccagcgagctccgcagaagacacaggcgctggttgctgggtccgctctccgcctccgccgcgccctcctcgcccgggatgggcccccccgccgccaccgccgccggagccctagtctccgggccgccgcctcggtcgccgcgtttgccctgaagcccggtgcccgcgcgccccggctcaccccgcagcttcactccccacccccagccgcctccccggccagactgcggtagagctctcaggatgctgccgccggtgccctcccgcctcggactgctgctgctgctcttgtgccccgcgcacgtcgatggactgtggtgggccgtgggcagccccttggtcatggatcctaccagcatctgcaggaaggccaggcggctggcaggaagacaggccgagctgtgccaggcggagccggaagtagtggcagagcttgcccgaggcgcaagactgggggttcgagaatgtcagttccagttccgtttccgacgctggaactgctccagccacagcaaggcctttgggcgcgtcctgcagcaggacatccgagagacagctttcgtgtttgcaatcaccgcagctggtgccagccacgcggtcactcaagcctgttccatgggagagctcctacagtgtggttgtcaggcaccccgcgggcgggcaccgcctaggccctccggccttctgggcactcctggacctccaggaccaactggctctccagatgctagcgcagcctgggagtggggaggctgcggagacgatgtggacttcggggatgagaagtcaagactctttatggatgcgcagcacaagcggggccgtggagatatccgtgcattggtgcaactgcacaacaacgaggcgggcaggctggcggtgcggagtcacacgcgcaccgagtgtaagtgccatgggctttcgggttcctgcgctctgcgcacctgctggcagaagctgcctccgttccgcgaggtgggcgcacggctgctggagcgcttccacggcgcctcgcgcgtcatgggcaccaacgacggcaaagctctgctgcctgcggtccgcacactcaagcctcccggacgagcggatctcctctacgcagccgattcacccgacttctgcgcccctaaccggcgcacgggttcgccgggcacgcgcggacgcgcctgcaacagcagtgccccggacctcagcggctgcgacctgttgtgctgcggtcgcgggcaccgccaggagagcgtacagctcgaggagaactgtctgtgccgcttccactggtgctgcgtggtgcaatgccaccgctgccgggtgcgcaaggaactcagcctgtgcctctgacccgtcgcctgcctcggaactgctggcagccacctctgggccatctacaggactattagattccagcagggggcgctgtctgagtccagcagctccctaggaaaagtacctatccaggccttgggaaattacaggggccagccaggaacttggggtttacaccagcccacgaaagcccgggggaacattcccctgaaaggccctttgctagttcctgcaggagatcactccccttggccccccagatggaaataaaaaagccagactctgccctctggaaataatattcctcagaattactgggatggatgggtgagtttagtatcaataaagacatttaaatccacagtttgagaggaggtagtcctagagggccaggatatggaagaaagttggtcctggtagagttagcatttcagtctgagtctatcattccacctgttaccaaggcatgacggagtgagggaggacttatggaaaggcagaaaagagggtgagggagggctcctggaaacctttagcacaccttctgttctttcttggctctcgagaacttgtggtcccatgttaaaggaacacaaagaggccagaagcttctagtagtgggcttagttgtcaggcgtctgtgtgaacttttatggcattctgtctttctgtgactcctgatgaaattaacggtcatgagattaaaagctcgtcatgaactgtaaaatg

SEQ ID NO: 29 - protein, 362 aa, Mus musculus
MLPPVPSRLGLLLLLLCPAHVDGLWWAVGSPLVMDPTSICRKARRLAGRQAELCQAEPEVVAELRARLGVRECQFQFRFRRWNCSSHSKAFGRVLQQDIRETAFVFAITAAGASHAVTQACSMGELLQCGCQAPRGRAPPRPSGLLGTPGPPGPTGSPDASAAWEWGGCGDDVDFGDEKSRLFMDAQHKRGRGDIRALVQLHNNEAGRLAVRSHTRTECKCHGLSGSCALRTCWQKLPPFREVGARLLERFHGASRVMGTNDGKALLPAVRTLKPPGRADLLYAADSPDFCAPNRRTGSPGTRGRACNSSAPDLSGCDLLCCGRGHRQESVQLEENCLCRFHWCCVVQCHRCRVRKELSLCL

SEQ ID NO: 30 - DNA, 14418 bp, Homo sapiens
gctccgcaggagacacaggcgctggctgccccgtccgctctccgcctccgccgcgccctcctcgcccgggatgggcccccccgccgccgccggatccctcgcctcccggccgccgccgttgcgctcgccgcgctcgcactgaagcccgggccctcgcgcgccgcggttcgccccgcagcctcgccccctgcccacccgggcggccgtagggcggtcacgatgctgccgcccttaccctcccgcctcgggctgctgctgctgctgctcctgtgcccggcgcacgtcggcggactgtggtggtgagtccggctgtcctggcgcggctctggaccctggagggtggggaccccgggacccaggacagactggggtgttccgcagcctcccggctctacctgctctccgagcccagctttctggcctcggccgggggcgtttctgaactccacttcgacgttcctaaccctcgggaacattctattgtgtttcctcctcccgggttctctcccaccccccgccaagttatgcgctcacccagctcaccaaggaacaggcgagtgggtaggaaagatctttcgggaagacacatatccgaggaaaagaatgtgtgaggagggccctggattcagggtatggggctggatttggagaagacaggaacaaggtgggaagccacaaggcagagagggccacacagctgccccttccccgccctgctttgcctaccaacccaccggcttctctctgggctcctgaggagtgggccttagtgacgacagagggaatataaaggggaaagtgagtcaggaccctggttttctctacctcgtcctccccaagcaaggaaaaggaggagcggaaggaaccggacccaggcgcccggcccttccagacctgggggtcatgaatgaaaaaatatgtgcagcccgggagatacgggaccgggaggggtcctgcgggaagggagaggggcctggccagccaagggaagggggcgtcttcccaggcttggccctagctagaagggacacctaggcagcgaaggttgcgggagcttcgagccttgggggtgggggtggggccggggcggggaaggagggtgcccgaccgggacggctcagagatccagatccaaaggacttttttccccctaggtctccagagccgcaaaccctcgcccggaatagctcagtgtttagagaggagagacttggacaataacgctgacgggttagccaatcctaagaaggcagggtcgtgtctatttgcatattgccatgtgattggctggatgccgaccctccgctcctccctcgccccccagatttggaagagaggcagatccccgtgctctggagagatagggagtaggatgcccacacagggagtggcgggcagcaatccctactccgtgatgcggagagccgtccgacgctagtgtcacggaaagggcgaaccgaggacgacccaggtcctatctagggaacatatgccctttgatccggcttagtataatgcagtggcagctttgaagcagatagatctaagatctaaacattatgtttgtgatcttgggctagtcacttcctttccctacctctcagtcttaactggaaataggataacagtctccctacctggcaggcttgctgggaaggttaggtgggaggacgtgtagaataataggaccttaggaggtactcagtatgtacagcgcccccctcacaacccagcttctcctggccagggtccccaggagtgaaaaaggggattcatttacatttaaaatccagagttccaaggaaaatgttgtaaaggaatctcttttccccataaacgcctaactttgccctttttcaaggtgtggggatggggtccctccctgatggccattgtcttccttcccctccctccccctctgtctaaatcattcttatccttacggttaaaataccatttcctccctgaagctgcccccttgtcctccttccattgccttctctgcgctcccactgtatcacatacattgggcaactatgctggttactgcatttggctgacaacagtcctttaggtctctcttccctgctcctggaaggcagataccttgtctttaggagccctgaggcctaggagtgtgttggtgctggagatgggcttgcagagtgtcattggactggctgattcacctttctgggctctgtatctgtggggcttcctttgttcaggaaggactgctgggtggcagccaagccaaaggagagtggcctggtccctgagagactgaccctgaagctgggaagaagggagtgggggaggaggtgacacgggcaggtgtgggagaacacagaggccttcatggccacagctgcagggcgtgccgggtgaggagtgaggggtcccagtgataacgtgtctgactgccttgctcagatgtgcctctgagggaatgagcctctcctccctgccttggccccttcactctcctttgtctattcattttgtttttctttctttatttctatttttatttatttatttatttagagcagagtctcgttctgtcgcccaggctggagtgcagtggtgcgatcttggctcatggcaacctctgtctccccggttcaagtgattctcctgcttcagcttcccaagtagctgggactacaggcacccaccaccatgcctggctagtttttgaatttttagtagaggtttcaccatgtttagtagaggtttcaccaggtttcaacaaggtttcaccgtgttggtcaggctggtctcaaactcctgacctcaagtgatctgcccgcctcggcctcccaaagtgctgggattacaggcccagccattaccatggcattaccatgcccagcctattttactttttattttttatttttttgagacggagtctcgttgtgtcgcccaggctggagtgcagtggtgcaatattggctcactacaacctccacctcccggctcaaatgattctcctgcctcagcctcctgagtaactgggattagagttgcccaccaccatgcccagctaaattttgtatgtttagtagagacgaggtttcaccatgttggtcaggctggtctcaaactcctgacctcaagcaatctgctcaccttggcctcccaaagtgctgggcttacaggcatgagccattgtgcctggtcacttgtctatttctgacacttcatctctttggtctgagcccagatccccttcccctggatctttgactctgcttacactcctgagctctccccaccctaccagtgccctccaagatcaagtttgggttgatgagctggaccaataattcccactggcctgaggctcttccagtcccctaaatccccagtctcacttcagctggcagctttcccagtaagggcttccaggctgttccccgatgcccaggacctgctttccctggccttcttctccctacttgtcagagaatcctggccaggtcagagctccagtgctggccaggaaagcagctgcagcagcctcctgcatcccactctgacattctagcagcagccaggctagaagcagagaggaccccaggacctttgagtgactcgactgtcttggtcaggaaagaggctcatgcccttggaattggctcggagacctggctccaggttcctgagaagtttctctcccaccttctttttcacttcccttccttactccaatgtgatgcatgctttctaaactctgtctccagctcaggcacagaggctcactcctgaaatcccaccactttggaaggctgaggtgggcggatcacttgaggtcaggagttcgagaccagtttggccaacatggtgaaaccctgtctctactaaaaatacaaaaattagccaggagtggtggcaggtgcctgtaatcccagctacttgggaggctgaggcagaagaatcactcgaacctgggaggctgaggttgcagtgaaccgagatccatgccactgcactccagcctgggtgacagagcaagactctgtctcaatcaatcaatcaataaaaataaactcttcccctagcctctctgtctttctctcatttgtaatcatatctttgtgaattacagaatcccagattcaaggacattggccaggctctctggaaatcatcttgtccagcctcattgcatccaggtcatccagcctatcctgtggccctgacagaccctgtcttgggagtgaggcagagagggagagcttcccagtcaccagttccccacttccgctctgctccttgctccggccttgcccacccccaggaagttctttacaacatctgacccatcattatttatacctccaatcggtggatgtagtaaagagctcactctcatagaatggtcaaatcaatctccttcttctctcttcctctttcctctgtttttttcttttcttttctttttttcctttttgagacagagtctcgctctgtcacccaggctggagtgcagtggtgcaatctcagctcactgcaacctctgccacccgggttcaagtgattctcctacctcagcctcctgattagccgggattacaggtgcctggcaccatgccagctaattttttttttttagtatttttagtagagatggggtttcaccatgttggccaggctgatctcgaactcctgacttaaagtcatctgcgtgcctcagcttcccaaagtgctgggataacaggcgtgagccaccgcgcccagccctgttttatattttctatgaaagaaactaaccctccccttgttccactagggaaaacaccacccagtgtcactcccttcccccatcccatcttgtctttcacccacccccctcctggaaaaggaaacaagagccagaggcctaggacagcctcatctggccccacagggaggcagggaaacgaccctggcttctttgtggcactcaggttttctagctgccacccccaacccaggctgggcctgaccaccctttcccatcctgtctttatctggggcccctgacccatcgtgggcagtcctgttgctggcccctgctgagctccagggtggggtgtgaaagggggtgggttggccatccattcccccctccaggcctcccgccttggcagcttcccctggagggatacaatggggctgtgagcagaaaagggcaggggcagaaggaggctggcccaatccaggccagagcatgccctgagcccaccagagttctggcactgagacatttcctggggggtgcagccccctcctgccctgttctcatcagaagccaggagttggtggggagaggtcagcaggaggtttgctcatcaggcccagcaagcgggggttccagaatgtgcactatgatggagaaatgccactgtggaggggatgaggcgagggcagtgtggtcaggctggcaggagggtggccgcaggacgcctgtcctttgtgggtcagtgaaagcacccccagcctgcaccctccttcctgcctaggccaggcactccctcgggtgcttctccagaactgccggaggaggagctgagggagagaaagggctctgggaggcttctccaccttggcctctttggctggttcctccagttcctgagccctctgtttaatctagaaagtagatctagaaagcacttacagataatcaggtccaatattttcacttacatgtgagggcagcaaggtcacagacaggcggtgagaagatgacttgcccctggccacccggaatgcaggcagctcagagccagactgagagtccacctctggctcagtgcctcattcttgtgaggaggtgggggatcaggaaaggggcacaggatctcccacaggcctctcctgctcccctgtcccaccctcagataggtgctccccaccccaatatgggcgagcagagggcccaggacagtctcctgggggcacctttgcctgccgcagccctgaccaataggaagcccttttgtacagcgaagtctgtcagggaagggaatgcctccacctctcccaagagtgatgaggagagatggtgaggaagggcagagggaaccaagttgggttaggggtggtgaggtggggaatggggtggctgggggggcagtggggaggcaggggttaatggagctgggcatcactggctttgatgtggtggtttgggtgggggtaggggctgggggaggggagcagtaattaccgagttagacagagcaggacaggacaggcgggcgggcacaggcccggcccagccgcctcagcagcagtcaggcaacatttttctgccccttctccaccacccacctcccccacccctgtgcaacccccacccacagccccagggctcagggctccctctgctggcttgtgggaggtggggtcagtgtggggaccttgggagtaggggtggggaaatagagggaggctggcttggagacccttcagagggcgttgggtagccagtgggctgtgatccctttggcctcagtgatccacccaggagtgcctgctggggaagaggagggtcctagagggtgcatttggtccaggagcagggctggatggaggaggaggagacacagggatccaggctgagaagaaatagcagagagttggagaaaagggtgttctcaggaatccacaatgctgcctgcaccctactgtttgtcctgaactgggcaggctcaagagatgaataagggtgtggtgggaagacaaacaccagttgttggaggaagcccactctctggacaggttctctgcatctgtaatctgggagggaggtgggtattactagtttcatttgacagttgaagaaactgaggctcaggaggttaagtctcatcatccatctaatgaagactaagtgccagcttcacatgctagggactcactcaacatcatagaacaagcaaatggcagagcccagatccaaactcaagtctggtggatcccaaaaaccctgagcgtactccatgaatgtccatgcatgagcttattgtcttcgatgagttttctacctagttagaaagataagacaagcaaacatgaaaaattaattataccactggcaggataacagacgcccccaaatgagaggcgccccgggtgatgcatggaggaaggtctgtggggactggggcccagggaggctccttagggcaagtgggatctgaggtgagtttggagagatgctaagattttgatgacttagggtgggtctgaatccagaattttagcgatgttatctggaatagattcagagttaatcaaccttgctaggggtacggggctgtgtggaggatggtgtgggaggccactggaagtcttctgatatctcacgtgcccatttccctccagcactgtttatgtttgaaatattcatctactgtgtcttgcaatagggatccctccaccagtggccagagtcagtcgcctcctgtcttgctcatctgcataacgagggtgaagtgggtggggctgaactgggtgatctctgacattgttcttggccctctgactcaagagatggaaaggtaggttaggccagaaacctaggacatccagggcttaggtctacacatattgccaatagggactggctggcccctgataccacctccctaggcaattgatcctaccaaccatggtccttggtagagagaccttggcgcaggccaagccggttagaatgaccatccattgccttgtcccttcttgtccgcatactgatttcttttagggctagcctcatttttttctatgcccaggaatggctgtttgatgaggatcccagatcctatatattgtgtattccctactaccactgtgcttcaggccccaaaacatgcaaattctcccaaaggagcacatcttctctgggctgatcctaggccaatgctgacccaaaggcctgaaaagcagagttcactccctaaggaagcataaagcgaggaaggtgaaaggtgagtggggatgggggagttattacttgatgtgttgtcaaaagccaaagttatagggggtacgtgagtctctcatgctaactcctcagtttttctgaagcccacaaaggggaatgacttgatcagagtggctcagcccacacagagttgacagaaaccagagatcggaagcgaagcttggtgttttgcccaatgccccctgccacgccccttctggagtttcatttcctatgtatttaggatgggagcaaggacaggagggcagggaacaaactggtcccttgggattctagctgctactactgcccatccctccccctgaccagcttgtaaacaagtctagttcccaggcagccagccagcctggggagccagacccagaccaggaactggctctggggcagtcccccagccccagccctacctcctgaaagtccctggcctccatactcctcgtgattctcccgtctctagtccctgcgaaacagagaaggtcaagaggtttttgtctttctgtcttgctcatctccactccctcctgccttcttaagggaggaggagggagaggagaaggatggggcagagtaaccttgggaagataaggccaggcaaccctgggaaactagggagttagcagagggcagggttgaggaggagggactggggaacttagaagtaagggaagtgggggtggggaagatgagcttgcagagcccccgactcacaggtggagccccagacataaggggctggacgactgcagagaggactcattccctgcctgattcccagtgggggaaaagagcatgtttgaggaaatgaattaggagtcatgaaataagatgtggacaggggcctgggctcaagtgagaactttctcttagatggcttatttactcattcaaaaccacatattagatggtgttcattgtataatatactacaggtattacatgtgacacagaattcatactatgcaattttttgtaatgaaaattggggttgggggaggatataaactaagtacctaagtcttccaggagatgcaaaggaaaataaggcagtcttaatgctcaagaagctcatagtcttatctcctgaccctgcacagccatgttggaagctgcctccaatccttcttataatgaggtgggatatatgggcagaggagggacagatagattgatggatcaatagagaccgatcagctctcaaaagtcactgggtcattggggtgccctgacccaccctccattgctttacttatctaggctgggaaagggtgggggccagtgctgggctggtcttaagcacgcaggaaggaagatgtggactgtggcctctccattgagagacatctgattcctgagctacttgggtacggatgacggcagcaacttgattttgtgtgtgtgcgtgcgcatgcgtgcacgcatgagaatgcacgtgcacacacacgtgtttgtgttgtagaccataaaggactgagcttactacacatcttcctgtaccacctcttcaagcatctccatccttagtgttgagagttctaccttaagacctaaattcctcttgcttctatttaagaccatcacatttcattgttgtggagccagaacattcctgggcagcctgtacttgtggagcaaatggggacagtggggcggatatgcactaaagcaaaactgaaaagtaggccaccttgacctctggcaccacctaccaccattctctatgttttctctctcctgggacccctacccccaccctgtcctctgctgaagagcttttgggtggtctctaattaccctctgctcccagatgctctactcattcatttgagatgggaatcccagctaagtgttcaaataggagcattctgatgagagcagttcccccaggtatgaatccctaaggaattaaccttcaggggtctggtataccaaaaccaaatgtcagctctctccttgggcagaacgaaggccaggagttgagggatttctggaagtgcgtgagacttcccgtgaagtcttcccctaccaagccaaatattgcctgcacccagcagtgatgtcaccctaatgcgcagggcttggttcactgccattctgctcagagaaggcaacagatccttggccatgtgtggtggctcatgcctgtaatcccagcactttgggaagccgaggcaggcagatcacctgaagtcaggagtttgagaccagcttggccaacatggtgaaacttgtctctactaaaagtacaaaaaaattagccaggcctggtggtgcacacctgtagtcctagctatttgggaggctgaggcatgagaatcgcttgaacctgggcagtggaggttgcagtgagctgggagcccgccactgcactccagcctgggtgacagagcaagactccatctcaattaaaaaaaaaaaaaaaaagaacgaaaaccacagatcctggagcaagagaagggtcagtgtcacctactttccaacaatgcttcagagacctggcccccagctccttcttcctgctctccagttcagggacatagaagatatcagggtaggagggcccaccttagagatgaaagcccaacacacccattttatagaaggagaaacctgggctatggagagggtgtgacttttctcagctaggctccattccctagccgttccaacatctcgtggcattctctctccctgggattgttcttgcctttcatccgggctgttcagctgacacatatccagcttgtggtccactaggaccatatcattccttgatactgcttacttttctttggtgtctcttgacgacacatgaatttccttgacggccttcttgatctttcttctgttatttcttttccttgtcacccttttgggctagaagtttgagttttaactttgacttacctgatgccagctgccttcaccttgagtaaaatttctataagaatttatttacaaagatgtgtgcaggaagataagattgaatctttgctctgtagcaattatcagactagactctagttagaggggacacagacatggactagcaggagagccagacaggacaatctcaagctcagtttggaggtagggtgggagggcatgtcacagctcccgctgcgggctgagtggggctggtcctcctcccttccaccccaagcccttttttgggttacacccctgacctgctattctctgctttccagggctgtgggcagccccttggttatggaccctaccagcatctgcaggaaggcacggcggctggccgggcggcaggccgagttgtgccaggctgagccggaagtggtggcagagctagctcggggcgcccggctcggggtgcgagagtgccagttccagttccgcttccgccgctggaattgctccagccacagcaaggcctttggacgcatcctgcaacagggtcagtgtggggagggggcggaagtggggctgctttctccctgctgtgggacccgaggagaggagaactggttcgctgaagttgcctgagccccacttccccctcacatgtgtctgggcaccctgcaaggaccctgcctcccaggcccctggggcagccctcccgccgcaggtttcaggtcccaggccccagctgaccgccccagcccgcgctgattgcacctgtctgcattcacagacattcgggagacggccttcgtgttcgccatcactgcggccggcgccagccacgccgtcacgcaggcctgttctatgggcgagctgctgcagtgcggctgccaggcgccccgcgggcgggcccctccccggccctccggcctgcccggcacccccggaccccctggccccgcgggctccccggaaggcagcgccgcctgggagtggggaggctgcggcgacgacgtggacttcggggacgagaagtcgaggctctttatggacgcgcggcacaagcggggacgcggagacatccgcgcgttggtgcaactgcacaacaacgaggcgggcaggctggtgcgtacgggcaggatggagtgagtgtgtgcggaaatgtgagtgtgcgcgcaggagtgtgcttgaggaagtgttggcaggagtgagggtgtgtaggtggaggggggcgttaatgtgtgggggagtgcgcacgggcggaaagatgggctgcaagcatggatggacatgtgggaggagaggtgtccagcctccaagaaggagtcacgtgggggtctgagaaggccagatgctggacggtacagcgggcagaatgggggaagggacactcagggaataggactgagggtctttagtgaccccaggcagagagggcacagcttcaagacaggacaggtgaagcaaagcttgcagtgggtaggaggtctggatgcctaggcaggggcaggagaataaaacaaaggtggggatgaaagacaggatagaagctaatgcaaggtctggggttttggtacagggaagccagggggagtgagagaggcctagaaagagttagaacaggtctgaggggcaatggaaaagagcgaaggacaaggaaccaatcctagtggaggttggagggagtcaggtggaggccaggacagctgtgaccaattctgggcatttgccaactggctgcccagcaacaccagcccaggtctcacctgcccagagccatggcagcctctcctctcccctctgtaacgaggagagccccaggagctctcattcaggggcaagaaggttgtctgggtgtgatggttccaggagggggcagggcagactcaggaggtgggagtgggacacatggtcaggttagcccctggactctgagcttccagaaatgattttcttgggtcttctgaaccatcagcgcttggtgggtttgggaatcttagaccctgcttcagacagtgactaggggagaggccgcctgggttccactctcagtactgcattcccagcgggccctcctgcaccccatgcctccgttctagcgttctccagggacatcgccatacataccgtgtcctctagggttcgggcctgaggcatcgggcagggggaggagggggcctgaagaggaatgtccggacaggcccacatacctgccgagagggttggggaggggtgacggagacagatgcccaggaggctggctctgcgtctgtgctcagcccggcctgggggccgtgaggggtaggaatgagggggccaggtaggcaggagagctagacttcgacagctgccacctctcccctcctccaaagagaatctcacccctgctgtccattctgctttctcccccaccccctgcctttggaccctggaatctctgcgctgcatattgtccccgtctcccctcttcgtcatcatcatattcctccatcctcaccattcctcctgctcctcccctccgagttgtcctttccttgatttcctccccctgaacttgcggtctccttttgtctgcattttcctctcttcctttcacctcccattcccaatcttattttctgtccatccgctgggcccttccctgcaccccctacctgtccacatgcgtccgcccctctgcctcccgcaggccgtgcggagccacacgcgcaccgagtgcaaatgccacgggctgtcgggatcatgcgcgctgcgcacctgctggcagaagctgcctccatttcgcgaggtgggcgcgcggctgctggagcgcttccacggcgcctcacgcgtcatgggcaccaacgacggcaaggccctgctgcccgccgtccgcacgctcaagccgccgggccgagcggacctcctctacgccgccgattcgcccgacttctgcgcccccaaccgacgcaccggctcccccggcacgcgcggtcgcgcctgcaatagcagcgccccggacctcagcggctgcgacctgctgtgctgcggccgcgggcaccgccaggagagcgtgcagctcgaagagaactgcctgtgccgcttccactggtgctgcgtagtacagtgccaccgctgccgtgtgcgcaaggagctcagcctctgcctgtgacccgccgcccggccgctagactgacttcgcgcagcggtggctcgcacctgtgggacctcagggcaccggcaccgggcgcctctcgccgctcgagcccagcctctccctgccaaagcccaactcccagggctctggaaatggtgaggcgaggggcttgagaggaacgcccacccacgaaggcccagggcgccagacggccccgaaaaggcgctcggggagcgtttaaaggacactgtacaggccctccctccccttggcctctaggaggaaacagttttttagactggaaaaaagccagtctaaaggcctctggatactgggctccccagaactgctggccacaggatggtgggtgaggttagtatcaataaagatatttaaaccaccaggg

SEQ ID NO: 31 - DNA, 1708 bp, Homo sapiens
gctccgcaggagacacaggcgctggctgccccgtccgctctccgcctccgccgcgccctcctcgcccgggatgggcccccccgccgccgccggatccctcgcctcccggccgccgccgttgcgctcgccgcgctcgcactgaagcccgggccctcgcgcgccgcggttcgccccgcagcctcgccccctgcccacccgggcggccgtagggcggtcacgatgctgccgcccttaccctcccgcctcgggctgctgctgctgctgctcctgtgcccggcgcacgtcggcggactgtggtgggctgtgggcagccccttggttatggaccctaccagcatctgcaggaaggcacggcggctggccgggcggcaggccgagttgtgccaggctgagccggaagtggtggcagagctagctcggggcgcccggctcggggtgcgagagtgccagttccagttccgcttccgccgctggaattgctccagccacagcaaggcctttggacgcatcctgcaacaggacattcgggagacggccttcgtgttcgccatcactgcggccggcgccagccacgccgtcacgcaggcctgttctatgggcgagctgctgcagtgcggctgccaggcgccccgcgggcgggcccctccccggccctccggcctgcccggcacccccggaccccctggccccgcgggctccccggaaggcagcgccgcctgggagtggggaggctgcggcgacgacgtggacttcggggacgagaagtcgaggctctttatggacgcgcggcacaagcggggacgcggagacatccgcgcgttggtgcaactgcacaacaacgaggcgggcaggctggccgtgcggagccacacgcgcaccgagtgcaaatgccacgggctgtcgggatcatgcgcgctgcgcacctgctggcagaagctgcctccatttcgcgaggtgggcgcgcggctgctggagcgcttccacggcgcctcacgcgtcatgggcaccaacgacggcaaggccctgctgcccgccgtccgcacgctcaagccgccgggccgagcggacctcctctacgccgccgattcgcccgacttctgcgcccccaaccgacgcaccggctcccccggcacgcgcggtcgcgcctgcaatagcagcgccccggacctcagcggctgcgacctgctgtgctgcggccgcgggcaccgccaggagagcgtgcagctcgaagagaactgcctgtgccgcttccactggtgctgcgtagtacagtgccaccgctgccgtgtgcgcaaggagctcagcctctgcctgtgacccgccgcccggccgctagactgacttcgcgcagcggtggctcgcacctgtgggacctcagggcaccggcaccgggcgcctctcgccgctcgagcccagcctctccctgccaaagcccaactcccagggctctggaaatggtgaggcgaggggcttgagaggaacgcccacccacgaaggcccagggcgccagacggccccgaaaaggcgctcggggagcgtttaaaggacactgtacaggccctccctccccttggcctctaggaggaaacagttttttagactggaaaaaagccagtctaaaggcctctggatactgggctccccagaactgctggccacaggatggtgggtgaggttagtatcaataaagatatttaaaccaccaggg

SEQ ID NO: 32 - protein, 363 aa, Homo sapiens
MLPPLPSRLGLLLLLLLCPAHVGGLWWAVGSPLVMDPTSICRKARRLAGRQAELCQAEPEVVAELRARLGVRECQFQFRFRRWNCSSHSKAFGRILQQDIRETAFVFAITAAGASHAVTQACSMGELLQCGCQAPRGRAPPRPSGLPGTPGPPGPAGSPEGSAAWEWGGCGDDVDFGDEKSRLFMDARHKRGRGDIRALVQLHNNEAGRLAVRSHTRTECKCHGLSGSCALRTCWQKLPPFREVGARLLERFHGASRVMGTNDGKALLPAVRTLKPPGRADLLYAADSPDFCAPNRRTGSPGTRGRACNSSAPDLSGCDLLCCGRGHRQESVQLEENCLCRFHWCCVVQCHRCRVRKELSLCL

SEQ ID NO: 33 - DNA, 4272 bp, Mus musculus
agagcgcacccagccggcgccgcacagcagtaggacctgtgctcgcttggcaatcctgctccgcatccgcctatccgactgctcaccggcagtcccggctgcagaccgtctgcacacctcggtcccatcggcaccatgcacctctcccagctgatcgcctgcgccctgctgctcgcgctactctcgctccggccctctgaagccaagcccgggacaccaccgaaggtgggtgctgtcgcggggacgctgggcttgtgaggggcgtggaaagatgtggtgcgcaggagggagcagagaacccggaaaggcagaccccctcggacttgctccctcaaagcggggacttctcgggttcatttcccagcctcgggagaatgtcgacacatgcacacctcccgtgccccaatgtgcccagcatgacctgcggcacgggaagagcaatgggctccccggaggagcaggcaagaaggctgcgtggcaggtggatgctggactcagctgtcccgcatcggtggaggcacgctcatggctgagaagggccacgccactctgggccccgtaaaagtcatctatgctacatcggtgcactctttcacctgtccactcttttctccgacaggtcccgagaaccccgccaggggaggagctggcggattcccaggcagctggtggcaatcagaaaaagggtgacaagactccaggcagcgggggagccaatctcaagggagaccgatcgcgactgctccgggacctgcgtgtggacaccaagtcccgggctgcttgggcccgccttctgcacgagcaccccaacgcgcgcaaatacaaaggcggcaacaagaagggcttgtccaaaggctgctttggcctcaagctggaccggatcggctccatgagcggtctgggatgttagtgcagctacccctggcggcggtaagtaacaccatcggacgctccccgctcgcctagctctgcacccaagagagccaagctcttatcactgtccttcgcagactgtttggtttcctccctgatccctatgttctgtgaccttcccccaaccaatttaggcatgggatcaagtgtacccagacatttgcctgccacctcacatatcccattttacagatttaaaaaacaacaacaacaaaaaagtgaacacgggccaggtcagagaccaggttcagccttagagtactccatctggcttcctctagaaaaatagagacaggcttatgcagtcccagcctccaaacccaccactgaccactggccagctagccaactggaaacttgttagagagatcctggaaagagggagagaaagatgtaccaccagccctgtgccagcagccaagcagtcaagtgctaggatgcctttctggggctgttgtccctcaggtgaggcaggcatgcagatatgcctgccccctcctagtagagagaacctctgtggcagcagcagggcactcttctgcctggggcattctgaatcttagccctgctctcaactcaactgtgggcaaactggtctatccagggtcctgatgctgctgccctggggcttccgagatgaaccttaggctggtgaccctgtttcaagagagaggcaaaggaacaagctaaagcttatttcgtgacctaacctcaaactcagtgtgtccacagtgagttctttaccagccttgtggtgctctgaactatttctggcctccttcccctccatggagacgggaagcctccatcttcccagcatcctcataagctgctgggtccttcctgacttccttctgctctctatccctgatgatgtgatgagacacactttacttagataagtgcttgacagtcaggcttctgctgttccttggctttgcctcttgctctagcccaccccagtggtgaggaggctgctctccccaacccaggaagattgaccagtggccattcttttcccagtaaggagtaggaacacctcccccatcacatgacaggagcctttttttttttaaaggcatgagagacctttgcagaagtgcagtgctctgtgtacttgtgtccccatattaattcatgagtaacttaagtgacagaccttcaggagcccacatcatacccagaagggatcttggaaatattggccactgacgagagaaacacatacccccagttcaggagctctgccaagtgccctggctctagatctcggatggccctctcctctctgcactgagtcttgaacaggctgcgtgcttcaccccagttccacagaggtgttaggtctctgctctactcagggagagcggtgattctagtacttatgggcgggtcttttgctatgttccatatgaatacctaagagatggagtctgaggacttgaattttcagtttgcgatgtatgtgccaagaaaggactttagagtctaaaccaacgttacttaacctccggttaaatgcctggaatgtgcttctctgaaggtgctttaggcatctgtgggcacagggtagtgagaatgttgaggaaaaatcaagacaattaaggcttctacaccctacccctccactttgaccagtggagatcatcagcctcctggaagttctcttggcataaaggcaaagcctcagcctcctctatgccagccccagtgagaggatagatcgtccttccaacctgaagtctcccagtggagctggccagcggagagcacccatttggtcttatggaagagtgcaaggctcatccttcatgctgatgaaaactcccgaggctctgcccctttctccacgcagaggttgactttggctctaggcatcgtcataatgactgccgctgatggttataggttttgattatacaactggcagagactcgggtgtggccaagacctcaatggacattttgcctctggccctaggaacaccacctgtgaaacagccagagaatcgagttagggagaattgcccagaccatcagagccaggcccctcgtgagtgcagtcctttaggagggccctgcatgtctgccagttttttgaacatggagaactcatgcagccaccactagtagggactgagtacagcggtcatcagcttactctcatccttcaaaccctccaacgcagcaaagctgtacatttgccccaggctggtggcagacactgccagctgctgcagaaggggacattgaagccaccaatttctaagacaaaggtagctaggagaggaagtgttctttgctgcttagaagttgtgacccagacagggcagatgcttaatatgtggccttttgttaaatcccagtgctggctctgggaggtggctattatccattttataggtgagctcaaagctacttggggccatccaggaagtcaaatcagatcgacgatttgagtccagaataggacacacttccccctgagttattctcttctctgtccctatgtagccaagcagacatgaaaccagatgaaactgactgccctggggggttgtgttgtagcaaaaatgagctggaaaggggccgctattctcagccattgccgagagcaaggcctgtagttaaatcttaggggaggggctcaggtctggcagatgctatggtttcacctgtgctggtccagccagtgccgatcaaggacctgtagatcgaaggcacacaggctttgcctagtgctactgtaagaaaggggggaaagttctacaactaccctgtgggatgggctttttcagtgaagagaccggaactgagtgtcctgtgttcactttgtgtttcaggattgggaactgctctgtgcactgaggccatccctggtcatcagcctccagcatctggaaacacctccaacgcaatgtggcttttacatttctttttttttttttcctcctggtactggcaatacacaacaccagctgttttattattatttggggaggggagggtatgattttattgtttggggttttttttgaaaatgaaaaataaaaagttatatattatatatatattatatacatgagacacacactcccacaccgacttgatgacaagggacagtttttaaagtgactgacaaaaccagctagctgtaaaacattgctgtttgtaaattcacgtcatgcataaatgtatttatgttgtaaagctatttatattgtttataaagagatatttataaaaattttatttatgtaactaaatgaaagaagccaaccattgtaatgtttttgtcctaactagttgaaaaaaatgttaaaaaaaaaaagccattcca

SEQ ID NO: 34 - DNA, 1033 bp, Mus musculus
agagcgcacccagccggcgccgcacagcagtaggacctgtgctcgcttggcaatcctgctccgcatccgcctatccgactgctcaccggcagtcccggctgcagaccgtctgcacacctcggtcccatcggcaccatgcacctctcccagctgatcgcctgcgccctgctgctcgcgctactctcgctccggccctctgaagccaagcccgggacaccaccgaaggtcccgagaaccccgccaggggaggagctggcggattcccaggcagctggtggcaatcagaaaaagggtgacaagactccaggcagcgggggagccaatctcaagggagaccgatcgcgactgctccgggacctgcgtgtggacaccaagtcccgggctgcttgggcccgccttctgcacgagcaccccaacgcgcgcaaatacaaaggcggcaacaagaagggcttgtccaaaggctgctttggcctcaagctggaccggatcggctccatgagcggtctgggatgttagtgcagctacccctggcggcggattgggaactgctctgtgcactgaggccatccctggtcatcagcctccagcatctggaaacacctccaacgcaatgtggcttttacatttctttttttttttttcctcctggtactggcaatacacaacaccagctgttttattattatttggggaggggagggtatgattttattgtttggggttttttttgaaaatgaaaaataaaaagttatatattatatatatattatatacatgagacacacactcccacaccgacttgatgacaagggacagtttttaaagtgactgacaaaaccagctagctgtaaaacattgctgtttgtaaattcacgtcatgcataaatgtatttatgttgtaaagctatttatattgtttataaagagatatttataaaaattttatttatgtaactaaatgaaagaagccaaccattgtaatgtttttgtcctaactagttgaaaaaaatgttaaaaaaaaaaagccattcca

SEQ ID NO: 35 - protein, 126 aa, Mus musculus
MHLSQLIACALLLALLSLRPSEAKPGTPPKVPRTPPGEELADSQAAGGNQKKGDKTPGSGGANLKGDRSRLLRDLRVDTKSRAAWARLLHEHPNARKYKGGNKKGLSKGCFGLKLDRIGSMSGLGC

SEQ ID NO: 36 - DNA, 1059 bp, Homo sapiens
cagagcgcacccagccggcgccgcgcagcactgggaccctgctcgccctgcagcccagccagcctgctccgcatccccctgctggtctgcccgccgacctgcgcgccctcgctgccgcccgtgtgcgcccctcgaccccagcggcaccatgcatctctcccagctgctggcctgcgccctgctgctcacgctgctctccctccggccctccgaagccaagcccggggcgccgccgaaggtgggtgctgtcgtggggacgccgagcctgggagaggcgtgggaggctgggggcttggagaatgcggcgcgcaggacccaggagagagggaaggcaggcggctgtctcctccgagatgcgcgtgggcgagagccggggagccctcgaagcgcggattcgggggtccacttctccagcctccggagaacatcggcccatgcgcagccccctaccccagtgtggcctgcccggcgagcagcaaagggagggcagggggcttccggagggagcggcgaaggcggccgcgtggcaggtggatgcggggccaagctggccggcatcggtgggggcggctctgggcttgggagggacaccccgcgccggcgggcgcgtggggctggagcatcagagtcccccgtgctgcagccgcgtgtcccttcacctgcccgctctttcctcggacaggtcccgcgaaccccgccggcagaggagctggccgagccgcaggctgcgggcggcggtcagaagaagggcgacaaggctcccgggggcgggggcgccaatctcaagggcgaccggtcgcgactgctccgggacctgcgcgtggacaccaagtcgcgggcagcgtgggctcgccttctgcaagagcaccccaacgcgcgcaaatacaaaggagccaacaagaagggcttgtccaagggctgcttcggcctcaagctggaccgaatcggctccatgagcggcctgggatgttagtgcggcgccccctggcggcggtgagtacggcccacccgacgcccagccccagcccggcccgggaccgcccgccgcccagccagcct

SEQ ID NO: 37 - DNA, 615 bp, Homo sapiens
cagagcgcacccagccggcgccgcgcagcactgggaccctgctcgccctgcagcccagccagcctgctccgcatccccctgctggtctgcccgccgacctgcgcgccctcgctgccgcccgtgtgcgcccctcgaccccagcggcaccatgcatctctcccagctgctggcctgcgccctgctgctcacgctgctctccctccggccctccgaagccaagcccggggcgccgccgaaggtcccgcgaaccccgccggcagaggagctggccgagccgcaggctgcgggcggcggtcagaagaagggcgacaaggctcccgggggcgggggcgccaatctcaagggcgaccggtcgcgactgctccgggacctgcgcgtggacaccaagtcgcgggcagcgtgggctcgccttctgcaagagcaccccaacgcgcgcaaatacaaaggagccaacaagaagggcttgtccaagggctgcttcggcctcaagctggaccgaatcggctccatgagcggcctgggatgttagtgcggcgccccctggcggcggtgagtacggcccacccgacgcccagccccagcccggcccgggaccgcccgccgcccagccagcct

SEQ ID NO: 38 - protein, 126 aa, Homo sapiens
MHLSQLLACALLLTLLSLRPSEAKPGAPPKVPRTPPAEELAEPQAAGGGQKKGDKAPGGGGANLKGDRSRLLRDLRVDTKSRAAWARLLQEHPNARKYKGANKKGLSKGCFGLKLDRIGSMSGLGC

SEQ ID NO: 39 - DNA, 32829 bp, Mus musculus
  misc_feature (1)...(32829): n = A,T,C or G
agagatgctgcagtggctcggggcgcgcacacacatacgcaccctcgcccgctgccgccacgccaggacagccagtggctaaggccggcggggccaagcagccccgaggctggcggcagggtctgctcaccaggcaaccgcagcactgccccagccaacacccttcccgcactctaggtaggtgcctatcatttttgtctgttccagttcagaggtttccctgggtgctgtttcaagaggggctcccggctcagcccttataaatgtcttccttgaaacttgggaggggacagggacaggcagcaggctgggtcccaattgatctctcatcccagccccatagtagcgaccccgcaggctcttacccgtcctgtctaggtgggtggcattctgcaaggcctgatttactggtccaggaagctggcccctgggagggtccagaaatctgagcagacagtggtaactacctgccaaaagggtaggggctccaagacctgccctggaccccagccagtgcccagcagctctgtagggccaggctctaccctgtccctggaactccctagatgaacctgaacctgagtttccaaatgctgagttcatgtggggggctgcttttgccgggtgacctccttgtgaagtcttggttctgctggactaggaaggctattgaagagaggcgagaacagaacacaagtttgggtaaaggctgtccagaagctggaacttgggagagaaactgaggcaagtcacatccctccaagggtgaggctggaatgtagcctgcagttccttttcccctcctccctcctcaaccttgtcttctcagatccctccccctcagcctccctggtgggagggaaggatttgctcaaagtttggctttccaggggattctagagagagggggtaacccctctgcctagccccatagcttatgtaatgggctacaggaggaaacagccccagccagggagtgtctgtcaccacctccaagactggctgcagcactgggggggcaagaggctaaggtgaagccatgcctagagactagtgtcttgggctgcacaggcagcctggacggtgaagctctgcccccaaccctaccccatccccaccccatccccacccctgggaggtagggggagttgagcttccttccggtcttcagggtaaagacgccaaagttgttagtacatttgtaactagtgtgaccagcacagagtggttctgcatgcagtgacctcagtcctgtacaagggtgggtttgaacccttctgcctaggagacaggagagggaactgtccgcatagcctggtcctgagcagctgggcagctatttcgggcactcccccaaacccctattcagatgccccgtcatccacttagcttctgagatgatctaacacttgtcccaggtcctgctcaaagggaccagctacactactaaatgacacgggcagccaagagtggaccacctgtgggaggggcaagtgtgactgaggctccaggggcggggccgggaaatggtccggtggttgaaacaggtgtcatgtttcagggctgcctccgagtcaggagcgttcagctcctcccaggggccccagcggcaacctctaggctctggcagaaccactcagtgcttcttgcacaaggtcaaagtccttcctactgtcttgtgggaatctttgctaatttagaggcagtccggggatgaagcaaacagataggaggggcttctgaagtgatagcatcaaagacactcaaggtcccacttgcctccttcagaagccactgcccttgtcgggaagaagtgaggggtttaaagagaagggctactgacgggactggtttctccccttccccaatctccaccaggccaaatcatcctttgcacctgccatcccagagcatgtactcttcagattccagccctgaggtcaccctcagactgtccccagtggccttcgctgggcacctccacttcctgacaccgcttaagtggaggcatgtgtattagctctgagtccccatgatccactagacagctgtatgtactgcgctggactgactccagatcagtcctaggaagtgtataagctgcaggaaacacccgaaccagcctctatgctgacactatcagccacgcatttgtgagggcttgaggagtacaaggtctttctggcagtaagtgtctcaagccagatgacggatgagaagacttcagagccaatctccaagcatggatatggtggtatttgtgttcttggagagactcagagtggaacgagagcatcagggaagaagtggtttatccacacaaagggaagaatcagagcgaagactatgccactggggtataaggaacttacattagacaatagaggacacttctgggcaggaagccgagccataggacaacctcctgtcacataactgtaaagatggccgcagatctggggtcagtgttgggtctaggcttgagacagtcatgccagaggcaggagttaggctgggatgcaggcacatttcttccagcctcaggccatcctctttcagatggtaaatgatgacatccttgtcatcttcccacatgctggcatttctggttctcccagggggaccactgcctctcatctagaccaaaattccaggactattgctaacttggaacacccacaggggtgacttcaccttcctggaagagttgaacctttctgtggttgaatgagtccttgctacaaaaggagtccatgtctctctgtctactaagcaaggcgcaatcaaaagcaaagcttcaccttaaacctgagtatcatccattccgggacatgctagaatataccttagtgtctgtaccaaccgcatggaccccttctgacctgtagaagtcaacccctgccctgctcagggcacccatcctgatttaaaaccatagtctcctcctgagggaccctgtgttatctcaatgtctgtcaatcccctttgaagttcccacctgaacaggcgtttgctctccactggtctgcagaaaagcacctgggagctggggtcatgggctgggaataagaaggagtctcttctcagtagacaggacaggcatgcaaagatggtcccgctgatgcccgagatcctccccttcctgctttggtccttcagaaaccagttgaagcaattgttcatgctcctccagttttacaaaggagctttccgaggactacaggtagagtgaagtagaaggcgcttgttctggaatatgcgaggttctgggttaaatcctcaccacggggtggggggggatgtggggtttgaggtctgtcttctaaggtttttgcttgctaccccaaattacacatagagaaggattggaggggnnnnnnnnnnnnnnnnnnnnnnnnnnnnnnnnnnnnnnnnnnnnnnnnnnnnnnnnnnnnnnnnnnnnnnnnnnnnnnnnnnnnnnnnnnnnnnnnnnnnnnnnnnnnnnnnnnnnnnnnnnnnnnnnnnnnnnnnnnnnnnnnnnnnnnnnnnnnnnnnnnnnnnnnnnnnnnnnnnnnnnnnnnnnnnnnnnnnnnnnnnnnnnnnnnnnnnnnnnnnnnnnnnnnnnnnnnnccccccccccgccccttgcaaacacttctttacttcaggccctctcccatcccccatccagtggtgcctggcctggcccaccgggcacccggcatcctccacacctctgcttagagccccatcctccaagcagactatagtaactgagagcctcctgggctttgatggccctgccagatagatcctccgcttaggatccagaaccggatcctaagcggagaacaggcattgagctcagtctccctctgtccctggcaggagttgagtgcatgagagaaaaaccactgagagagtcatgggcacacccaggccacattccctaaatgtgtggtgttgggtacaagtctgtcagtggaatatcttcctgccatagtctagagtttgcctcattacattgcatctgtggaatgtgaggaaaaggtctaagtggcaggtgtctctgccgttagcacggaatgtcaacacacctgactcacaaaagtgcagtgtgtatcctggggggtgaggtggggttggggggagcttggttataaggtttagtctttcccaagcatcagcagtggcccaattaccgctctgacctcacaagagtcccttgaggtgaccctctttgtccccattttacagaagactaaggtacaagagattagtactgaaggcagtaactcagagtataacaactagggatcccaggtctcattggctcaataacctgccctgtaaaactcgagacatgctacatgccgaggctgaggtgagcatccaagaggctcctgcaacattttaaaggttgaccgtagatctctctgtgtcttataccatgctccaagcgcgcttccgactatagtgtatgtaatactaccacaccctttaattctctgctctgcttgactgatgaagggaagagctggggcgagagggaactggacatcccaggaggcagcaacagacctgctggactaggtacatttttaaaactggctccagagagatcctcagcctggaaactctgtcatgtgctggagtctacctcatagtctgctgtttccaagctgtccttccttcctctcaccctttgtttcctggactaggaactttaaccagaacccctgaacctcctatcctcccatgtgctagtacctcacagaaccagccccttgatggtgagagtctgtgcccgactgtgccagcctgtgcctgcacccctgtaccagggcagctggcctgggcaagacttggctagctcagagatagctgggccaatctgggcctggcataactccactccggcctcactctgacacaaaggccctctccatcctgggccttctaggacatgtcatagagcagatggtgcgggaagatgactgatctttgaacctgaaagcacatctagtggctgctcttagccatccagtgagtgccataaaggcggggggcggggggggggtcctcagttactgcctcccctgtgctcagcacaatgcctggcccattgttactgaacactgtgatgggattagatgtggtagcacattcctatgatcccagtgtttgagagttggctacagaaggattatgggttgaaggtacgtgtgtgtggagagagagagagagagagagagagagagagagatgaactcacacacacatatacacacatgcacccacacatacacacatatatactcacacacacatactcatacacacacacacacacatgcattcacacacacatacatgcaatcgcacacaaatgcactcacacacacatatgcacacaggcacacacacacatgcatttacatacatgcattttcacatatacacactcatacacatgcactcacacacacacacacatgcacgctcacaaatgcatgcactcatggtactggaaatgaatgcaaggcatagtagagtctggctgcctcaccttcatggaagcagaaagctccaacctttactatatatatatatatatatatatatatttagaaaaaagaaaaatatatgtatatacatactatatataggttgtaagccactatgtggttgaactcaggacctctggaagaacaaccagtgctcttatctactgagccatctctccagccttactccaggcttatatgtgggctttcctagtttacccaggatgatggggctcagcatatctcttcacactggctgatatacagttcatcccaggagaaactgcatatcttcctgaccccacacacatctcctccaaagcctcctctaaggtcttggtccttagagggtactcagggtatttaggccaggctggtggatgataaaaatcctagattaaagtttaaagtatgcagtgggattggattctctctaatctacagacatcaccagaaagacaacatgaaatcttgaccactacatggcaaaggtgagagcactgtgacttcacctctgccttgctctgctgtgttcaggataaatgccctctgcccaagctcctcccagcctagccattgtgttggaactggagctccagccctggccagctggcaaaaggcaagagagcaaatgaggagtggcttctccatgcccagagacaagttcacgattccccagacccagggacgatttccaagttcctcaaccagggagcctcctgggaaagtcaagaacaggaagtggaaactagaggagatggaggcagaagggacatctagaaccatcctctgcctccctctccacaggagactgatacaggtccagagggctcggaggcaacacagccgctccgaggcaactcggataaccagcacaggtgtagccacagaaccactctgtaatgctcacctagttcccattctgctgatggggaaattgaggctccatcagggaggataacttatttaaacccacggagctgtacagagatgaggtcggggagccagagagaaacctcagaggttaggaatatgccctgctctttcctttcgagggcctgcgctagtgtgtgcccagtgtggagctccagggcgttcaacaccctcttccagcacgtgtgagcacctgcattcacacacaagtacacataattaaaaataaagtcaaggcgggtggtggtggcgcacgcctttaatcccagcacttaggaggcagaggcaggcggatttctaagttcgaggccagcctggtctacagagtgagttccaggacagccagggttacacagagaaaccctgtctcgaaaatccaaaaaaaaaaaaaggtcaatctttataaaaaaaaaaaaaaaaagaaaagaaaagaaaaacagagatgaaggcagtactaccaactcttgcctactggttttggttttgcaagccttgggtatgtgggctccaaactgagccagcacctccctgtgctgtggacaatgcccccatatttgggcagcagccagaagtacacttgtgagatttcctatgactagatgccctgctgacccggagaccttggtgtgcttgtgtgtgtgggcatatgtaccatttgctgtgccaaagannnnnnnnnnnnnnnnnnnnggtaggaatatgccctgctctttcctttcgagggcctgcgctagtgtgtgcccagtgtggagctccagggcgttcaacaccctcttccagcacgtgtgagcacctgcattcacacacaagtacacataattaaaaataaagtcaaggcgggtggtggtggcgcacgcctttaatcccagcacttaggaggcagaggcaggcggatttttaagttcgaggccagcctggtctacagagtgagttccaggacagccagggttacacagagaaaccctgtctcgaaaatccaaaaaaaaaaaaaaggtcaatctttataaaaaaaaaaaaaaaaagaaaagaaaagaaaaacagagatgaaggcagtactaccaactcttgcctactggttttggttttgcaagccttgggtatgtgggctccaaactgagccagcacctccctgtgctgtggacaatgcccccatatttgggcagcagccagaagtacacttgtgagatttcctatgactagatgccctgctgacccggagaccttggtgtgcttgtgtgtgtgggcatatgtaccatttgctgtgccaaagaccttccttccagcctggtcaggttatatactgagttccattgtgagtacgcacgtatgctcatctgtgtcatgggtgtccattggctcctggaggcgaacagccacaacggttctcaattagttgaatgcgactcacaagcaacatatgtgctagatactttactaagtatggtgctctaagacggacagactacagcctctcctcttaggggactgatattcttccactggagacaaaccgttccacaggcaggagctgtggacgatcaagggctgaattctgtattcaggctgggataccttgggcgcttccaggcaggtgaggggtgaacagcgctctacagtatgaggacaccttacttatagagaaattatttggggtgtgggagaagggtgctgtggatgatgggggaatcgagagatgccaaatgtctgcatcctagtgcagggggtgacatccagacacacttcctgacaagaagcagagaagatgaggctggggtcacatgaggagggagtgcttctgctctggaccctaacccctgcttcttgattctgccaggcatccctgccacacacccctggcaggctccggacactctcccccttgccttttggttgctggtgggagcccaggtggaggcgggctggaaggcttttcccatgagtggagtaggagggaggtgggacacagtcttccttctcagcccacagggcaggggtcctgactctgctatctcaggaagccccagcgagccagagctgaaaggacctgaaaaagcagtttcattgaggacacagatgtagacagcaagttgcatagctaattagtggggacaaacctgccttgccctgggccttctgcaggctccacggcagggtgggctgttagactctgcagccaggtgctctggtcctgtggcagctctgagaggggggaatgggctgtgtgaccagactcaccccaaaacctacaaggtagcttctgggagtccttgtcccaggaaatcttcccagagagtagatagggaggtgaccccgtccctgcccttgcctctctgaatgaggtcttcgtgtccccagctgctgacctgctcccggtgacctacccagcctgactttaccaagtctctgctatcccagtgtaagacagaggctcctctgagagtttccttaaggctagtggtacagaaagctggtggatcactaacccatgtggtgggagtgtggctgataggactgagatcatgactccatttgaaacacctaggtgccttacctaggcaccacaggctggagcaaagctaaagtgagcctttccttattttgagaaaatcagtcataattcagagactgtgcagctccagggggacttagtggcccccacctgggcagctatgggaagaaaagtaggaagagagatgtcccgatccccaggtaccagaggaggatgtcattaacgccaggcaaagccccacccccttccccgcccccaccgccccccagggctcctccagacacagagagatcaccagtgcaagcaagcgggcaggtgggttcttgcctgccaattagttccgctttcacttcctgatcagcacctgaaggctggagggggggggggccaccatgcagagccagactcccagggggaccggggaagcactcagccctagaagagctccatggtaattgccaagcccctccctccctcctctgggatctgaggaagatgagtgctttagctctacagcccaggcagttcctaaccagatgtgcctgcagctggaagggcaccgatgctcagcgcccccatcctgtcttctcaggtgtgtctcagtctccagttgactctcctggagctgggctgcagctcctctcttctggactctgcctttgcctgaaacacccaccatgggagcaccggccaggaaaagggcaagcttgctgctgctgctgctggccacaatggctctggtctcctctccaggtaagagcagctgattatagggttaaatcatgactaccacttaggtagcaattcctctgcattgctgaggccatttccttgctaaattcttcccatacacgggtcttcccttccctttgaagttgggaggagaggaaatgaatcgaagatgaagaaaaacatgatccagagactgagtgccacagcacaatgtggcaaagccagatctccatgctatccattggagatgtggcctctagaatgtcactgcacagtgtggtaggcatcgccaagtgtgacccctgagctaagatgtgattcaaatgaaaatgatgccttcagctggactcgccacatgtcaagtgctctatgggacacctccatcatatccagacatttttcttaaagaatgctccaggaccctggatccaggggaacagcagctaccccatagaatgccagggggcttccctgagggagcctggctgggtcgggcagagagcagccagatgaggcagggcagggttgctgacagagggtccagtctccatgctactccccgtgctcacccagcccagagatgggaagcagctgccggaagtcagaaaagggatccaacatctggagagttcccaccctggagctgggcgtctccaaggcttgctgctgaggggccaaaattcaaatcaacaggagtctgtttccctaaagagctccaagggagaagaagcactcatcccacagccctggagtttagaacgcaccttttgcccatgaccgtttgagacacagccatacctgtctctgctggcatgctcaaaggctcctgccaggtccctgtcgctctgatttaccctgtacccacggtgcttcatggggctgctgagaactggatctaactcccacaccttgatcctggctctctccaccagactggaggaacggccagggtgggaggctctgacggcacagaacgagatcctgtatctgtctgctgtagggagagggagaggatgactctagacgccgctcctcctgcctccatctcctctggtatccatgttctactcttgactctcattgagaaaggccagaggagagggtctccagcaacccctctcttgggggcaactccctttggaagcaagaggtgtgagcaccccttggggaactcaaacccaaataggtcagaagacaattgccaaatgcctagggccaggacctgggctgccacctcccagtatggcccgattttagatctgctccttcctgagacctggaaagtgcttctctgcaattggcctgctcaacagatcctagcatagatctctgggacactcacacccagggcaaggagaggcgtagcatcctccctcacaaagcatctctctggcttctttcttccactgcagtgtctcatgactcttctggggaaaagaataaccggggcagagtgggggctttgggggcaggagccacagagaaggctgcctttgccggggagtatgtgtgtccatatgtgctcacctgtatgtacggcagcatagacaggtctgtctgtagctacttggagtagtgtgggctgtgtgaggcggtctgtagaccagatagaggctatggggtgcgggtgtgagtgcagcacatcttggacctccatgccctcaactccagctcctttcagaagcatcttttacacccagatttctgggtttcattcccagaacttctgatttcaggcctccagaatgaagccagggcctcagatggccccaaaaacctgaagtcaggaactgtagccactgtggttaaaaatgtgggctgcaaggcgaggctggatgagggcagacctcctttgctttgaagtgcagaaagttattaaactttctccatgttggagacataagaagcacctcacttcttagatcactttgagaaggaatttagagtatggtatcaggcagccatatatgcaaacagatcaacagcacaattcttatcatggcttaattattatcaatgatacatgcatatgggatgagcaggcggggctattggcagctctgcctgccttatccagaagtgtgtgctgatgcatatctggccatctgattggcttagagagagacacctgtatatgagcacatgtgtgttgtgagaacattgtacgatcatgtgcaggtaagacatgaaggtgtgtacatgtgagtattggggtgtgcgtgagggtgtgcacttgactgagtgtagaagagacagccttttcaagatgaaagacaacaatcttaatcttaactacaggtgtgcccagaccccactctgccacctcccaccacccagactgagttcctggaagctgctattgcctacggtggttgttcccagcagcctctccatccctccttctcctgctttccatcctcccctctctccaggtggtcccagctgggacagggtccctaccctccatcaccatcattaactcgggattaagctgggctttctagggggagatgatgcagttgctgtcaaacaccacctctgaggccccaggcagcagtaagagagagtggcaagcaactgggggaggggcagacgacataaacaggactcaagggaagcccttgccagactgttctgaaagtcctgcctcctacctcatttctcattcagagggctgcttagcagatgccccaactcccaagaggccagagctggccctcagatgcagcagagggaccacactcgctcagaagagggctggcagctggatgtgcccagaaagaaggcactaattggttaatggagttccctcctcccatcccccacccaacacggaaggtctgaaatcagctgcaggagagattggggccaattagggggcctggctcccacctgatctcgcagtggtggaactcccactgtgcctatgcgggtgtgaagtactgcccaggcccctgcctgctgatcctgtgctggtgagacaggacaatggtgtgtgcaaagcaaggccctggctgagacagggctgggaagggcaagtgtgaaacccatttgctaagcaacatcacctggctgacacagagtgactggatgaccactgggcctttctttcctgagacgggacatggttataaaactgctaccattcgacttgctaacccagccaacatctagctgtccttcacccctgaccccagttgagtctaacagccaggtgctgtttgcatcctgtgtcaggccctccctatttttcactgttagaccctgttatggacctggtgttagcattctgtctaaactccaccccacagctacctggcaacagccagataggcctgacccattataaaagggggctgcttgccccctcctttctcttgttcctcttgctctcttggtctcactctgtcccctcgctccttcccctccttccccattccctacccccctccatgtgctcatggccggcctctacttctctaatctttctctgcctttctctgcctctgctaccctcttgactcccctcctcatgccctgaataaactctattctatactataccatatatagtgcggttgatccctcagggggacaggatgccttgacatgggcccgctgagacacccccttccccaacacctcactgcccctcaatatagaacatattccctctttctttatctttttataaacacattacctgagaagtgaatttccactcttttcataggaaaacatcagatcaatagaaaggagggcctatagcttgtccaaggtaatatagccagtaggagacccagcccagctcccagatgagcacttttcactaaactacactgccctaggagggcactggactccaggaacacataacactcttttcctctgtttcctgtcggtgtcttctcatatgcctcagctgtgtgagatttcctgagagtcttaccgaatcttgtccctaaagcactctgcaacatggcaccctgtactgtccgttctcaattttcttccctggactgcaaagccctttaaagaaagggactgtgtgtctgattcatttcacagcccagttccaggtatacagcaagtgcttaatatgtgactgttggtgggtgagtgaatatgccagtgtagattgatgggcctgcccagtctgttttaaattaattttaattaaattaaagtttggttccttagacacattccaaaaccctcaatagccacacatggtccatagctacctactggacgacacaggaaagggtgcagccccagtaagttctgcccttgacattggacttcgtctcagacattgaggctatagtggtaccccctgtttgcaggatggagtttttcccagggaaccccagctacctttggacccgtctttgaagagcaacctgttggcctgctattcccagaggagtctgcagaggatcaggtgacactggcgtgccgtgcccgagctagccctccagccacctataggtaagagagcggggaggctccgggcagccatatggcattccttgacaccagtcttacccattgagatctgaagtcccatccccacttcatcccggctacaggtggaagatgaacggcacagagatgaacctggaacctggttcccgtcaccagctgatggggggcaacctggtcatcatgagtcccaccaaagcacaggatgctggtgtctaccagtgcctagcctctaacccagtaggcactgtcgtcagcaaggaagctgtcctccgcttcggctgtgagatccatgggagccaagctgttgggtgtgggtagacggggccaggaaaaggttcccaggaaggacaggtggcggtagcctcgagccaggctttcctgccagcaaatggcatgctagcgactgcttcttgcccatggtggaggaactggggcgctgcatgcttgaagacagttgcctgagccctcttctccatctccagttctacaggaattctccaaggaggagagagaccccgtgaaaacccacgagggctggggggtgatgctgccctgtaacccacctgcccactacccaggtaagtggggattctgggccagcgcaggactgggagggggaatgtaccagaaaggacttctggatgctagcatgggagaggaaaaacagaacaggaggtggtaagtcttaactttcaatggctctgcaatttcctagctggactgagagtgttcgcagttcatcgtgaggagagagtcaaagtcatctctcccctctccacccccagcccctgatcagagctgcaagttctcatgagaagacagagtttgcagcatgtttggggtcttgcccagattgcctgtgatcccagtacacccttgtttcctcagactccttcctttctaggtttgtcctaccgctggctcctcaacgagttccccaacttcatcccaacggatgggcgtcacttcgtgtcccagaccacagggaacctgtacatcgcccgcaccaatgcctcggacctgggcaactactcttgcctggctaccagccacctggacttctccaccaagagcgtcttcagcaaattcgcgcagctcaacctggctgctgaaggtcaggatctagggtaatggaggctgaaagggtcaataggccttggagaaatggtattctaccaagcttaagaattgcagctcagaatatatgaggtcctgctgccgggtctcagatccttgccccaggccccccagaaaaagagaacatttggagattccaaatatttatgtggtgatctgtgaactttggaaggcatgggccctaatacaaagcacctccctggagccctttgcatgtggttcacacagtcaatctctctctcccctccaccccccccagatcctcgactctttgctcccagtatcaaagcccggttccccccagagacgtacgcactggttgggcagcaggtcaccctggagtgctttgcctttgggaagtaagtaccatcaggacaagagtgtcctgggcccaggcagggtttcatttcaaagcccctcaagagcaggagggatcacagagttaaagagaacaaagtcaatagactaacagagtcctggacacaaaacaggcaccacccactacctataaaacaagttctgccagtgagacatcacatacacacacacacacacacacacacactcacacacacacactcacaaacacacactcactcacacacacacacatacacactcactcacacacacacactcacacacacacactcacacacacacactcacaaacacacacactcactcacacacacacacatactcactcactcacacacactcactcactcacacacacactcacacacacacacacactcactcacacacactcactcacacacacactcacacacacactcacacacactcacacacactcacacacacacagatggaggggctttataggcatgagggagtcatgtggcctcccaacagtaaacagtaaaatcctaagcagtttaaggagcaagccagggctagcagcagaaaaaacagtgtgccgaccccatcctgctggttcaaagctcagcttcaacacttgctggctgggagacctcgggcaaacaacctcacatctgaggctcagctctaggactgacggatggtcagggttgacagtggctaaaggattcttacaaagatcagttgggtccatggataccaggccctgagagtggtgcttggtgctttgacaggtgtggcatgaatgttacattagccatttcacaaattacagcagaaaggcttgcttctctttcttgctgtcccggaaaaaggatcctctagagcaagggtcattgctttctgctgtgtgggatgttcttgagcatccaggaaacatgtataaatgagcagggtaacatgttgattcctcagatccaatggttccctagcccattttaatgtccaaattactaataactaacatgccttggaaaggcggggtgatgataaaagggacctataaaagcctgttcctagtctcgtttgtgccctcttcccgtctgtcccctcccaaacaggagtccccttcaccttgtccagtgcttcaggagggcctgcgagtgtgagcataggctctgtggacactcgagaaacatgctcagctcagctcatcccctctggctctttctcccctgccagccctgttcccaggatcaagtggcgcaaagtggatggttccttgtcccctcagtggggcacagcagagcccaccctgcagatccccagtgttagctttgaagatgagggtacctatgaatgtgaggcagagaactccaagggccgtgacaccgtccagggacgcatcattgtgcaaggtactgagctggagatacctccgtcttccctgaggaagcagcatgaaaatccaagagactgggaggccttctgcttgagccttctgacccttgccaggactgctaaacatagctggagaggccgtttcagagctcagcgggggcatacagaaagcacacaagtatttcaaaagatttagttgctaaatcagtccctggcacaaccagagagtgccagcttcttcgccctcatttctttgttctctccagcccagaataccaacagcgccctctgctgtcacttacaaatactgcagccttataattccctattcctctctttcttccccacagctcagcctgagtggctaaaggtgatctcagacacagaagccgacattggttccaacttacgttggggctgtgctgcggcaggcaagcctcggcccatggtgcgctggctgagaaacggggaacctctggcctcccaggtaggaaaccaaggcttcctcccacacgaccaccctcttctgctgcctggcccgcttaccctgctgggccaaccaaggggtcttgggacgttctggtgcttcttctcacagagagatacatggccacaggtgggtcacctgtgtagcatcacagagatctgggatccctccatcaaccagaaatgtaaccttaatctagcctccaggagacctaaaggaccaggcagccctgaagtagacctatattcatgaaccctcatgctgagggatgttagcttacagcctctgcagcacaccaccaccatcaccatcaccacccgcccctgactccttcctggcctccagtggtcctcatcttcctgccttggctcttctgcacagaaccgggtggaggtcttggctggggacctgcgattctctaagctgaacctggaggactccggcatgtaccagtgtgtggcagaaaacaagcatggcaccatctatgccagtgctgagctggctgtacaaggtaaaggacccaggaggcagggacagccctggtgcttgaaggttgtgtctggctgggcttctccaaatgcacacttgcaggctcgtgtgctaacatacacatgtatgttctttcttgttttccaatggcccctgagtagcaccagtttcaagacatgagactgagagttttccaaagacatggtttttgggttttttttttttgtttgtttgtttttgtttttacttgctgcattgaaaagatctgatctgtatttaacctagttccttcagctctgtggcctgtggcaagttacctgattctatgcctcagtttcctgattttaaaaaatgcttcatcctgtccttgaacagcgctttgaggggaattgaaattcaaagggtgaactatgacaggcctgacattcagacggggacaaggaacaccagccacttgagcttacaaggcacgttttctctgctgcaagatgaacgttagaagcctttattaagtttaataaggctcaacaaagacttactcgttttattttttattttatttgtacgaatgcctgtatttgtatgtgtatcacatgttacagaagtcaaaagaaagtgtagattctcctgaaactggagttacagatggttgtgagccactgggcactggaaattaaactcaggtccatgctctgacttactgagccatctctccagccccaagactcttcctttcattcaattattcaaccaataacttacaaagcatctcatgaggagcaaatacagtagtacttaaatacttaaagtactgtacaagaaaagggagaggaacaaacttagaatttattccagagaaccctaaaagtatggttaaaaaaataccaaggacagcagtggtacccaggtgagcaggttagatggggtggtcaggaaagactctgaggaagtcacgtttagactgtgacctgagggagacagacttgtaaatatctggggaagtttcaggtaatatgcatgcagacacaatgatccaaaggcaggtaagacttggcattcagggggttaaaaggaaagctatggggcgtggaggtggaaagatgactcatcagttaagaggactggctgctcttacacagcagacccaggttccatccccagtacccacagggtggctcacaactacctctaattccagttccagagactcatacgccctcttctggccgccttaggcactgcatgcaagtggtacccagacatacaagcaggcaaaacattcatatatatatatgtgtgtgtgtgtgtgtgtgtgtgtgtgtaaagtaaaaataaaagaagtctttaaaagaaaaagggaaaaagttgaaagcaagacagacagttggagcgtgtgagagggacgagtggagccagatgtgatgacacaggggtagatgagttctagagatgttgctgccacttgacaagttggtctccagaggccagatgcttagcacatagccaggtgacatcttagttgaggtgggcgggtggctatctcgagggtgagtgtttgagcaccctctctcctgcagctctggccccagacttcaggcagaaccctgtgaggcggctgatccctgcagcccgagggggagagatcagtatcccgtgccagccccgtgcggctccaaaagctacaatactgtggagcaagggtactgagattctggggaacagtaccaggtaggttctgtgtgccaccgctgagatgacgtcttggaggtcagtccccttccaatggccacggtgtgtccctcagttgactagatctttttctgtccttgctgcagagtgactgtcactttggacggcaccttgattatcagaaacatcagtcgatcggatgaaggcaaatatacctgctttgctgagaacttcatgggcaaagccaacagtaccgggatcctgtctgtgcgaggtaaggactgtggtctgttcagatgctgggatgctgttctgccaaccatctgctcttggcttcctatacatctgctttcaaggcaacgtcagaactcagtctctcttgggaccacccctggccagcctccagaatctggccactcatgaatatgcatctcttctaggggtacaggccagagcctctctccttcctgggctttttccctcacagagccttgttttgttgttgctgttttgctttgtagatgcaacgaagatcacgctagctccttcgagtgctgacatcaatgtgggtgataacctgaccctacagtgccacgcctcgcatgaccccactatggacctcacgttcacctggaccctggatgacttccctgttgactttgataagcctggaggtcactaccggagagccagtgtggtaaggcctgaggcctcataattctccctccttccagataagacaggggacttgagatggcctcagtcattaccagcttcaggctttccaaagtttcccctaacccccgaggccatgccgagaaagctcaccctaggacccaccgccacctttcctgcatccacccaaggaccacccttctaagttagaatcaagctttagcattccaagtaccccaggagattctctccactattgtccctctcccctagtgcaaatgccatcattaacttggctcatgaagactgtcttatgtggcacgctttgatgtccagtggtaccaagtagctcattcttcccattgaacagataggaacactgaggcacagagagcatggatgccattcagccagggaatctaggctccatttcgtcttgtggcctattacactagtcagggcttcctcctgtctcatcattccttgctgttccctgtgcacagaaggagaccattggggacctgactatcctgaatgcccagctacgccacggagggacatacacatgcatggcccagacagtggtggatggtgcatccaaggaggccacagtcctggtccgaggtaatgggagtcagccaccacaggtctcagagaggctctaggctttccgactctccccacctctcttccctccctgaaggctgacagaagctggagagatggacacttctgtttagtgcctgtgtagttctttgtgggtcctaaatgagtagactatgtcttccaaagccatgatcaagaaagaaaatgtaccctaaacacccctaagactttacctcatgagcccaggagttccaggtccagtacagggcaaacttgtacacccttctgtgagccaccaagtctgagatgcttcgctcctcatctttctcctctgcccccatcctctggcctcccaccctatctctcctgccctctgatgccccatctagatactgagtcagcccaagctgaggctagataaaaccgactcaaactgtccacctctgacccagggtgctctgcttcttacaggtcccccaggtcctcctgggggtgtggtggtgagagacattggagacactactgttcagcttagctggagtcgtggctttgacaatcacagccccattgccaagtacaccctgcaagcgcggactccaccctcagggaaatggaagcaggttcggaccagtaagtatgaggcaccatgtgggtcagttttaataaccactgtgtgcacagcagaagacaggggtcaaagggtcaaggctgaccctaaggctttgaaaagaattaaggtgtgttctcttacctccagggagaacctaggcaggcagggaaaccttcatagccaggagggtaaggagagggagagctggaggcagcagccttgtgttgctagagaacgccggcatgctcaacatccgtggagggaagagcaaaggccctgtggcatcagagctcactagcttttcagacaagcttttcagtcaaagagtaattgagggcttagcgaacgaacggtaggaccatgctgagggcagaacacaaatggccacatgggtccggaacctgccaccatcataaatggccgctggccgctgactgcctgggaccttgcagatcctgtgaatatcgagggcaacgcggaaactgcccaggtgctggggctcatgccttggatggactatgagtttcgggtttcagctagcaacatcttgggcactggggagcccagcggcccctccagcagaatccgcactaaggaagcaggtgagtgtctggagttctctgcaaagggagccccagcagagggagtccccagcagagggagtccccagcagagggagctctaggctctagcagggggggggggagcggggggggcgggggggggctggggagagctccagcgctgtggggggaggagcccnnnnnnnnnnnnnnnnnnnncccagcagagagcgctctaggggaggagctccagcattgtggggggaggagcctcaggaggggaagcttctgcagagggagccccagcagagggagctctggggggcagctccagcggtgtgggggaggagctccagtagggggagccccaacagagggggcatcagagagggtgggagggaggggcagccaagggacccccagcagaggaagcagaaacaaagttccaatctgcttaccaggcctcggctctctggtcaataggcgaaagatgaaaagttagagacaagctgctgcttagacaaagcgcctgatccaaaccccttgctgaaaagcacgcctgcaggcagatctgtagtcattgttttggcttagtatttaaagccagaagagctgatttgaacaaggatcacactgtgagagcctgctcttgaacctaggacaagaaccttgagtgggtttttaagtgcccacaaactgcagaaatcagctaatgaggaaggtgtctgtgtgcatgtgtacactcgtgtgggtgtggacacacattcactgtgcagggggctggagaggcagccagactccaggccctgtttcactggcatctgtggagcaggaggcctgagaccctcagtgaaagcgtttgtcagagtcaggggagagtgtgaggagagaaccaggaagggctcaggcatggccttcacctgcccagaggcagctgctatgctctcaccattcccagcggagggcctgggaccacacagcggcatcgtggtcagaatcctgtctccctcctatccagccagacctgtgcttgcgtgtggtggagggtctacctccatgtctcctacctgctccaggctgactctccaggttctggaaccacacaacattttaatctggcacccgtgttgagtaggaaactccagaaggcatgctttctgaccgaacttcttagggattctagcatctcagaaactgatgcgcacagacgcgcaaagggacagcgaggatctttaaagtcataagagcagagatcacgttctagctgggcggtgcgttagctgtgtgaactttggacaagttgcttaactgctctggacctcaggctttctgtcttaaccctggccctctgtgagctgacagaagccatctttgtgtttttcagtcttgtttaataccaaagacgggagattaaatcgagaggggagagagggaaggagagggagagggggagagagagaatcagggaaataccttgggataccctctaacaaaatgtattgttttgttgttgtttgcattaactggcattcaaaatcctttagtctcatcagctgaatgaagcaaactggagttggtctctggtttagctaaagccaacaggggtaaggatgacatataagagtagccattccgtgctgcctggcctctcatttcaattcttctactttcaccttgacagacacatcatcatcatcatcatcatcatcatatcatcatcatcatcatcctctagagagtataggcagggcccagaaaggttaagtgactaggcagaggaagtacagcaaagatgggaattgttctcaggctagcctgactctgcagtcatgcacagaaggactatgggaaaataacttaggacaccccatctaagatgatccaggcacaggctaggggattgctcccccctttctgcccattaacatgacccatttgtgtttcttgccccttacagtcccctctgtggcaccatctggactcagtggagggggaggagcccctggagagcttaccatcaactggactgtaagtggacagggacagagaagcaggcaggtgccttgcctctcaggagtcacacccctttccctcctgacatagtttgtctacagacaaagtggcagcaacagaaaagaccgatgaagtctcatttggaagctggcagcttccttccctccccttgcatctctcacaggcatcccggggtcactcctctgggtgaagactgggtggagtccgatggatgggtagggacacacacccatgacccctggcccacaccgtgctcttgccctcagcccatgtcacgagagtaccagaatggagacggcttcggctacctgctgtccttccgcaggcaaggcagctccagttggcagacggcccgggtgcccggcgctgatacccagtacttcgtctacagcaacgatagcatccatccctacacaccctttgaggtcaagatccgaagctacaatcgccggggggatgggcccgagagcctcactgccatcgtgtactcagcagaggaaggtaggctgtggggcctggggcctggccctcctgcactccctggcacagggaaggagaggggacaccatgggaggagaagaaagcctggggtgcacttggtgtcccctgggcttcatcctgcgcactaagcttcatcttgggccctgggatttccccccaaatcctcagcacagtcctagtcagggtcagtcactctgtgggatgcagaggtggcttggcaacatatgcccattctttatttattctccctagagcccaaggtggcccctgccaaggtctgggccaagggttcctcatcctcagagatgaacgtaagctgggagcctgtgctacaagacatgaacggcatcctcctgggatatgaggtgagcgtcccctggggccggaaagaggcaaggctaggctttccagagtagatggcaacatctgacagcttactagtcattcccctaggatcactaattcctcagtgaggggatcaagagggaaggaagacgaaacacccaggcccaatattgtcagagagagagagagagagagagagagagagagagagagagagagagagagagagaggaagagagaggaagagagagagagagagagagagggagagagggagagggagagagagagagagcccactatcaggctgtgtctcccagggttggctcctgagatttgcacaataggttagacagatcactgggagatgctagctccactcttagcccttgattgaagactatttaaggtctgctattctgctggtgactggagttgtgtatactgggcacgttacaagcacacacatacactttgtatcccagcagatgctccaagatagcacctgagtgagtgagatgaacactgcattgagagccagcctccggggactgaagtgtaggaggcagaggcagccacaggtctgcagtagaccctggcaccccattggtactagaatgagcttgctgggcatggcctaagtgatggggggggggggagctttagaaggcttaaagatgacaataaccgccaggcagtggtggcgcacgcctttaatctcagcacttgggaggcagaggcaggtggatttctgagtttgaggccagcctggtctacagagtgagttccgggacagccagtgctacacagagaaatcctgtctggaaaaacaaacaaacaaacaaacaaacaaacaaaaagatggcaataacctgggcctttctcacctctgctcatctccccactagtcacctacttctttcctcccatatcctggacaccgtccttggagtagacactgttgaatagccacagccgcattaccattctttctaggtcacctgacctagcgtgcaggttatcaaactagaccagccggagtaccagagaagcatggagactgtgcagccaaaagctttgccatgcactttaacatatcctgccccttgtagattcgctactggaaagccggggacaaagaagctgccgctgaccgagtgaggacggcagggctagactccagtgcccgagtcaccggcctgtaccccaacaccaagtaccatgtaactgtgagggcctacaacagggctggcaccggaccagctagcccttcagctgatgccatgaccatgaagccccgtgagtgccagggatgaggaagggcatgtgccacggggtagggacaattcctgccacatggttagcaccaggcagaagcaagtcagaggacctactgaacatggccatggcctctgaggcatcttctggatttttgtggtgacagattgttctgagaatccctgctatatgggtgggcatcagaaaggggctggctagtggtaaaaggtggccgcagaagcatacaacagtgtccccaatctccccacccctcaccccccgcagcaccacggcgacctcctggcaacatctcctggactttctcaagttccagcctcagccttaagtgggaccctgtggttcctctccgaaatgaatctacagtcactggctacaaggtgagaaagggcatgcaagcctgctatgaggagaaatagctcctgtctttccagtggtcacagggacctgcaatccctagcagtgtggcatctggggctaggagagacagaagtatagggactctgggtagttcacggtagaggctataaaaacacatacatggtactgctgcatgagggcagggtagggatgggctgggggggtctgaccaggcagcttagctgtttgcacacctacctcccactggtgagcttgaccaatgagaaactggaggaggcaggaaggaccccttgagggtccaggaggctccatctggaaacttctatcccacagatgttgtatcagaatgacctgcagccaactcctatgctccacctcaccagcaagaactggatagaaataccagtacctgaagacattggtcacgctctggtgcagattcgaaccacggggcctggaggggatgggataccagccgaagtccacattgtgagaaatggaggtactgcccctcccttccccctttctacctagcccctcagcagtattagtccaccagatactggtcaagggattgtccccaagagccagctctaacctagacaccacccctcccccacgagaaaggaaagacaggcaatgaatggtgccatgccactgtcccctccctaccctagaaccaccccaaggtaaggagggaatacatcttttttatggggaccaagaacgaaggtcagtgcttcatgggtaaggctaagaacatcactagccttcggttcttaaggcctccatatgactttcctccagaggcctccgggttcttttgtaagggcagggctgggaggctcactcagccacccagtttctaccactggctggtttcaggcaccagcatgatggtggagagctcagccgtccgccctgcccatcctggcccggtgttctcctgcatggttatactgatgctcgccggctgccagaggctctgatctcaacgctgcccgccacgcccaagctggacacccaccctaacagacacagcggctggccacagcccccctccaacgccaaggtggtccaacactgcctgagagtggctggcttagacaccttctcccaacagtaccctttacgtaggaggtaggatatttctattctgccacaggatagaaccaggcaaggaatttttctttaaatcaagaggcactgggcagtgacttccatgataatactagacctaatgcctggaccctctggggtcctggacagaaggaacaagcctttggatagaaggtatttgacatacatcttcagatcaagtggatggccctctggggccacaagtgggcactgccatctctcatctctctgggatgagagtcccaggcccagcaggaacatgggcagcagtgggctatcaatttccctctatgaagcagagggacctttcctagtccttgctggagaagcaccagttagtccccacgtgggcttcgtggctccccggcagtcctgcttactcagtagccaagaacaaggccctgggttactggggataagagctctaaagggttgagaggctacaccacctgatggaaaggggcaccagactgaagcccattcaccaccccggtggcactgccctctcagccagcactgccatccctgccatcctccagatggaatggtggagtgacagggccacttgaggtggctatgtgactaaagggcttgtctcgagttgccttgcctcatcgggatgctcccttcatggaccctccagggtaggggcaggcgacgcccatctgaatgccgtgctcttcccttcagctctgctgcagacttgtgcctgcctcctcctcccataactgcaggccctggaaaccagctctcaacacagcatccattctttgtcctgggatggagaggcatctgagaagggtcagcatcaatgtggccctgcctgcttccaggaataccctccatcacctggccacacctgctccccaaactgcctggactctcttgggtccccggaagtaaagagttaatgaggtggtggaggtggaggcagcctgccttgagctctgggtacattaccagtgacagcccagactacagaagctgaagaagccttatagcttgacttatccataccttgcccttaacagatgaggaaacgatgccgggcagtgctggcgcacgcctttaatcccagcacttgggagacagaggcaggcggatttctgagttcgaggccagcctggtctacaaagtgagttccaggacagccagggctatacagagaaaccctgtcttgaaaatggaggtccagaaagggttaaggacttcttagggtcacatgatctgtaagtgacaaggcttggtcaagaaccagagtctcctccccacctgtgggaggctctgtggaggagagaggtgtggtgctgggcagtcgccgcccggtctctaggatgagccctctgcttcaagaggttcagggtgctgagaagatcaacatggatgctctcagtccaaggcacaggcagatgctaggagtcagcggcctgaggctggcttctgccgggaactcagcagggagagctggctggaagcctctcaggctctctcttttcatttcaagaaaagaagtcaaagtgaggacagagttccctagaccaggactctgtgcagcccgaccagaagtcgccagtgtccatgccctgagcccgtgagagcagcagagcaggcgtttcaagaggcgcttgccctgctgttccttgggccatttctgtagtttacagttagagctctattttgttatgggtttttaaaactttaagccctgctcttttttcctgggcgggtttatgttagtatttacccactacaattttttaaagatgtccacacactcacgtacctttccccctaccacctccataccttcccctagctaaggactgcttccttggagctgattaaaccctccctcttctgctcccagcacctcacatacaagggtgctaggggctcagccatgtgatcattctccctcccgtgaaccccagagatggtccagcatccctccctccccatcctatgctggctgggatttggctcgggcctagccctggaaaaccctagctagccctggaaaggggcacctgaaaccttccaaggtttacctatttctcactgccttggatttgtggggtggggggagtgctaaagaaatgggtatctagtgtctgggcagggtaagtgaacctggtcagggaggtgggaggctacagcccctaagcttttcttctaacaaggtccatgaaaagcaggcaagctgctgggagactggagaagaggaaaaccttagccctgtgcaggtagcatttgttgtggggaggtgaggctgtgccagcagctttggagcttcgagtgttatctaaggtgtaaggagaccgcaggtgactcgccaacgtgagcttgtaaatagaaaaaaaaaaagcctcttgctgaggaaacttggaccttaactggcttgggaaggagggctagatcaaatggcttctcagagtccctctcctgccaagggtcctcttgacttctgtacaggctggggaagcttttggactggcccctgctatggtcctgactgctaggggtgaagctgcctataaatacctctccaggggctgggaggtaccctctgttccatccaccacactgctcattgccatctgatggtacaaatgagtggctctgccatccagggcagcaggtgacccagacagtggggaagtcgggaggcgatggggcagggatgagaagcctgaccgtgaacaggagagaatgaagccaaggtcagggaagtcttcgggaataaggaaagtcttcctttgggtaacctttgaggtgtttcggtgttctgtccaatcctggttgggtgaagtcctgacttgaggagtaggaggtgctgagtcctcccagagctgagatcttagaatccaaatgcctagtacagggaagccgtagaggtaccatctgcagcttattttaaaagccatcagtgggaatgatccccagaacagtccttacaaagtcgtgccttccccagcgcatcctagcctgtactctagccaagagctcagcgtggctagctaagctatccttccctcacgccttttcttctcctagttgtccaatagccaataggactcctgcatgccagggggacagcagtatcctcacacctgttaatgagttcaagtgtggtgttcgctctcgctagctgagactataccttgccagggagtctggagtgtgcctcttgaacctgtatatgtggtcccaggctttgggaaatcagggcattaaagaaaacaagagaggaggaggagggaaaaagaaggagggagaaggaggaggagggaggggggaggaggaagaaaagataaaaaagctctgttcagagccccaggtagcctcagaggcctagggtccttaagtttctttagagggaacgcaacctgccttggcaccagatacctccaacttagcccccggtttcagagcccacatagctctgagctcagggcttcactggaccactgatgaccgttcttgtttaaatgcagctcctccaccccagcccactgttcgctcttgtagtagttattgattgactctggtagcaagcagttcttaaataaagatgtgttctgaacccgcctgggcggctggaagcactgcacttctcacctcattaaagcctgcctgcctcctgggcctgttgttcagccagtacacccacccctcccacggccaaccttgaggaagctgtgcacacagcccatacagcttcctccaactagagggaaaagccaggctgggagacctgcaggcagatggaggctgagcgctgctgacatcctgagcaggtttcacctaatggtggtcagcatgctggagtggggtgagttgaggcgtggagccacttccagttcctctgatttcaatacacttgaagtgttgactccctggtccctaaggagtttcccctcctcccccatgaagagattaatgtccccaactggtaaggaggtgactatcacctctgttgttcaatcagggtgacacaaagtggtggaactcctagtcaatttccagccttgacactctccactgggtccatctgactgctattccaggtaagcacacatagggatacatgcaagcagccccagtttggtttttcagtgtcaagtaggtaggacccacgttgtgtctcaggtttgtgtgtgtgtgtgtgtgtgtgtgtgtgtttgtctttggttttgttttgttttgggaggaaaggaaggtaaatggaggcctctctattcaatgcttagttttctgaccagagcccttccagaccttccagcatggcaggtagactttagtctttagtcagcttttaccttcccagggcagttatatacacaagactcagggaactgaattgaggggggcttgctgctgtaaccgcagccacgcagatgctaagcaggatcttgccaagtggtcctggctggccatgagctcactatgtagactagactgcctcagtctccgaatagctgtgattacaggaatatgccacctcgaccagacagaactatgctgttgtctttacaaaatccatctgacggtctttgtcctcctctttgctcaattgcttttgactcaggatttgaagcaattgagcggagtcaaaattcagaagcccaaggcacagagaggcagctatgaacaagatcgatccaccttcgacttgactattggtctgcaagagaatgctggcaaagtgttaaatggttgtcctgggtggtttccatctacagaatgtgagacaggagcctacagcagtatgttaccaagctccttccatacagacagaattcatcacagatccctttacaatgagctaaccctgaacgtttcgggagactgcctaggaccgaatcacataataggccccaaaccccagcacttcggtttacaaaacagcttacctcagg

SEQ ID NO: 40 - DNA, 8455 bp, Mus musculus
agagatgctgcagtggctcggggcgcgcacacacatacgcaccctcgcccgctgccgccacgccaggacagccagtggctaaggccggcggggccaagcagccccgaggctggcggcagggtctgctcaccaggcaaccgcagcactgccccagccaacacccttcccgcactctaggtgtgtctcagtctccagttgactctcctggagctgggctgcagctcctctcttctggactctgcctttgcctgaaacacccaccatgggagcaccggccaggaaaagggcaagcttgctgctgctgctgctggccacaatggctctggtctcctctccaggatggagtttttcccagggaaccccagctacctttggacccgtctttgaagagcaacctgttggcctgctattcccagaggagtctgcagaggatcaggtgacactggcgtgccgtgcccgagctagccctccagccacctataggtggaagatgaacggcacagagatgaacctggaacctggttcccgtcaccagctgatggggggcaacctggtcatcatgagtcccaccaaagcacaggatgctggtgtctaccagtgcctagcctctaacccagtaggcactgtcgtcagcaaggaagctgtcctccgcttcggctttctacaggaattctccaaggaggagagagaccccgtgaaaacccacgagggctggggggtgatgctgccctgtaacccacctgcccactacccaggtttgtcctaccgctggctcctcaacgagttccccaacttcatcccaacggatgggcgtcacttcgtgtcccagaccacagggaacctgtacatcgcccgcaccaatgcctcggacctgggcaactactcttgcctggctaccagccacctggacttctccaccaagagcgtcttcagcaaattcgcgcagctcaacctggctgctgaagatcctcgactctttgctcccagtatcaaagcccggttccccccagagacgtacgcactggttgggcagcaggtcaccctggagtgctttgcctttgggaaccctgttcccaggatcaagtggcgcaaagtggatggttccttgtcccctcagtggggcacagcagagcccaccctgcagatccccagtgttagctttgaagatgagggtacctatgaatgtgaggcagagaactccaagggccgtgacaccgtccagggacgcatcattgtgcaagctcagcctgagtggctaaaggtgatctcagacacagaagccgacattggttccaacttacgttggggctgtgctgcggcaggcaagcctcggcccatggtgcgctggctgagaaacggggaacctctggcctcccagaaccgggtggaggtcttggctggggacctgcgattctctaagctgaacctggaggactccggcatgtaccagtgtgtggcagaaaacaagcatggcaccatctatgccagtgctgagctggctgtacaagctctggccccagacttcaggcagaaccctgtgaggcggctgatccctgcagcccgagggggagagatcagtatcccgtgccagccccgtgcggctccaaaagctacaatactgtggagcaagggtactgagattctggggaacagtaccagagtgactgtcactttggacggcaccttgattatcagaaacatcagtcgatcggatgaaggcaaatatacctgctttgctgagaacttcatgggcaaagccaacagtaccgggatcctgtctgtgcgagatgcaacgaagatcacgctagctccttcgagtgctgacatcaatgtgggtgataacctgaccctacagtgccacgcctcgcatgaccccactatggacctcacgttcacctggaccctggatgacttccctgttgactttgataagcctggaggtcactaccggagagccagtgtgaaggagaccattggggacctgactatcctgaatgcccagctacgccacggagggacatacacatgcatggcccagacagtggtggatggtgcatccaaggaggccacagtcctggtccgaggtcccccaggtcctcctgggggtgtggtggtgagagacattggagacactactgttcagcttagctggagtcgtggctttgacaatcacagccccattgccaagtacaccctgcaagcgcggactccaccctcagggaaatggaagcaggttcggaccaatcctgtgaatatcgagggcaacgcggaaactgcccaggtgctggggctcatgccttggatggactatgagtttcgggtttcagctagcaacatcttgggcactggggagcccagcggcccctccagcagaatccgcactaaggaagcagtcccctctgtggcaccatctggactcagtggagggggaggagcccctggagagcttaccatcaactggactcccatgtcacgagagtaccagaatggagacggcttcggctacctgctgtccttccgcaggcaaggcagctccagttggcagacggcccgggtgcccggcgctgatacccagtacttcgtctacagcaacgatagcatccatccctacacaccctttgaggtcaagatccgaagctacaatcgccggggggatgggcccgagagcctcactgccatcgtgtactcagcagaggaagagcccaaggtggcccctgccaaggtctgggccaagggttcctcatcctcagagatgaacgtaagctgggagcctgtgctacaagacatgaacggcatcctcctgggatatgagattcgctactggaaagccggggacaaagaagctgccgctgaccgagtgaggacggcagggctagactccagtgcccgagtcaccggcctgtaccccaacaccaagtaccatgtaactgtgagggcctacaacagggctggcaccggaccagctagcccttcagctgatgccatgaccatgaagcccccaccacggcgacctcctggcaacatctcctggactttctcaagttccagcctcagccttaagtgggaccctgtggttcctctccgaaatgaatctacagtcactggctacaagatgttgtatcagaatgacctgcagccaactcctatgctccacctcaccagcaagaactggatagaaataccagtacctgaagacattggtcacgctctggtgcagattcgaaccacggggcctggaggggatgggataccagccgaagtccacattgtgagaaatggaggcaccagcatgatggtggagagctcagccgtccgccctgcccatcctggcccggtgttctcctgcatggttatactgatgctcgccggctgccagaggctctgatctcaacgctgcccgccacgcccaagctggacacccaccctaacagacacagcggctggccacagcccccctccaacgccaaggtggtccaacactgcctgagagtggctggcttagacaccttctcccaacagtaccctttacgtaggaggtaggatatttctattctgccacaggatagaaccaggcaaggaatttttctttaaatcaagaggcactgggcagtgacttccatgataatactagacctaatgcctggaccctctggggtcctggacagaaggaacaagcctttggatagaaggtatttgacatacatcttcagatcaagtggatggccctctggggccacaagtgggcactgccatctctcatctctctgggatgagagtcccaggcccagcaggaacatgggcagcagtgggctatcaatttccctctatgaagcagagggacctttcctagtccttgctggagaagcaccagttagtccccacgtgggcttcgtggctccccggcagtcctgcttactcagtagccaagaacaaggccctgggttactggggataagagctctaaagggttgagaggctacaccacctgatggaaaggggcaccagactgaagcccattcaccaccccggtggcactgccctctcagccagcactgccatccctgccatcctccagatggaatggtggagtgacagggccacttgaggtggctatgtgactaaagggcttgtctcgagttgccttgcctcatcgggatgctcccttcatggaccctccagggtaggggcaggcgacgcccatctgaatgccgtgctcttcccttcagctctgctgcagacttgtgcctgcctcctcctcccataactgcaggccctggaaaccagctctcaacacagcatccattctttgtcctgggatggagaggcatctgagaagggtcagcatcaatgtggccctgcctgcttccaggaataccctccatcacctggccacacctgctccccaaactgcctggactctcttgggtccccggaagtaaagagttaatgaggtggtggaggtggaggcagcctgccttgagctctgggtacattaccagtgacagcccagactacagaagctgaagaagccttatagcttgacttatccataccttgcccttaacagatgaggaaacgatgccgggcagtgctggcgcacgcctttaatcccagcacttgggagacagaggcaggcggatttctgagttcgaggccagcctggtctacaaagtgagttccaggacagccagggctatacagagaaaccctgtcttgaaaatggaggtccagaaagggttaaggacttcttagggtcacatgatctgtaagtgacaaggcttggtcaagaaccagagtctcctccccacctgtgggaggctctgtggaggagagaggtgtggtgctgggcagtcgccgcccggtctctaggatgagccctctgcttcaagaggttcagggtgctgagaagatcaacatggatgctctcagtccaaggcacaggcagatgctaggagtcagcggcctgaggctggcttctgccgggaactcagcagggagagctggctggaagcctctcaggctctctcttttcatttcaagaaaagaagtcaaagtgaggacagagttccctagaccaggactctgtgcagcccgaccagaagtcgccagtgtccatgccctgagcccgtgagagcagcagagcaggcgtttcaagaggcgcttgccctgctgttccttgggccatttctgtagtttacagttagagctctattttgttatgggtttttaaaactttaagccctgctcttttttcctgggcgggtttatgttagtatttacccactacaattttttaaagatgtccacacactcacgtacctttccccctaccacctccataccttcccctagctaaggactgcttccttggagctgattaaaccctccctcttctgctcccagcacctcacatacaagggtgctaggggctcagccatgtgatcattctccctcccgtgaaccccagagatggtccagcatccctccctccccatcctatgctggctgggatttggctcgggcctagccctggaaaaccctagctagccctggaaaggggcacctgaaaccttccaaggtttacctatttctcactgccttggatttgtggggtggggggagtgctaaagaaatgggtatctagtgtctgggcagggtaagtgaacctggtcagggaggtgggaggctacagcccctaagcttttcttctaacaaggtccatgaaaagcaggcaagctgctgggagactggagaagaggaaaaccttagccctgtgcaggtagcatttgttgtggggaggtgaggctgtgccagcagctttggagcttcgagtgttatctaaggtgtaaggagaccgcaggtgactcgccaacgtgagcttgtaaatagaaaaaaaaaaagcctcttgctgaggaaacttggaccttaactggcttgggaaggagggctagatcaaatggcttctcagagtccctctcctgccaagggtcctcttgacttctgtacaggctggggaagcttttggactggcccctgctatggtcctgactgctaggggtgaagctgcctataaatacctctccaggggctgggaggtaccctctgttccatccaccacactgctcattgccatctgatggtacaaatgagtggctctgccatccagggcagcaggtgacccagacagtggggaagtcgggaggcgatggggcagggatgagaagcctgaccgtgaacaggagagaatgaagccaaggtcagggaagtcttcgggaataaggaaagtcttcctttgggtaacctttgaggtgtttcggtgttctgtccaatcctggttgggtgaagtcctgacttgaggagtaggaggtgctgagtcctcccagagctgagatcttagaatccaaatgcctagtacagggaagccgtagaggtaccatctgcagcttattttaaaagccatcagtgggaatgatccccagaacagtccttacaaagtcgtgccttccccagcgcatcctagcctgtactctagccaagagctcagcgtggctagctaagctatccttccctcacgccttttcttctcctagttgtccaatagccaataggactcctgcatgccagggggacagcagtatcctcacacctgttaatgagttcaagtgtggtgttcgctctcgctagctgagactataccttgccagggagtctggagtgtgcctcttgaacctgtatatgtggtcccaggctttgggaaatcagggcattaaagaaaacaagagaggaggaggagggaaaaagaaggagggagaaggaggaggagggaggggggaggaggaagaaaagataaaaaagctctgttcagagccccaggtagcctcagaggcctagggtccttaagtttctttagagggaacgcaacctgccttggcaccagatacctccaacttagcccccggtttcagagcccacatagctctgagctcagggcttcactggaccactgatgaccgttcttgtttaaatgcagctcctccaccccagcccactgttcgctcttgtagtagttattgattgactctggtagcaagcagttcttaaataaagatgtgttctgaacccgcctgggcggctggaagcactgcacttctcacctcattaaagcctgcctgcctcctgggcctgttgttcagccagtacacccacccctcccacggccaaccttgaggaagctgtgcacacagcccatacagcttcctccaactagagggaaaagccaggctgggagacctgcaggcagatggaggctgagcgctgctgacatcctgagcaggtttcacctaatggtggtcagcatgctggagtggggtgagttgaggcgtggagccacttccagttcctctgatttcaatacacttgaagtgttgactccctggtccctaaggagtttcccctcctcccccatgaagagattaatgtccccaactggtaaggaggtgactatcacctctgttgttcaatcagggtgacacaaagtggtggaactcctagtcaatttccagccttgacactctccactgggtccatctgactgctattccaggtaagcacacatagggatacatgcaagcagccccagtttggtttttcagtgtcaagtaggtaggacccacgttgtgtctcaggtttgtgtgtgtgtgtgtgtgtgtgtgtgtgtttgtctttggttttgttttgttttgggaggaaaggaaggtaaatggaggcctctctattcaatgcttagttttctgaccagagcccttccagaccttccagcatggcaggtagactttagtctttagtcagcttttaccttcccagggcagttatatacacaagactcagggaactgaattgaggggggcttgctgctgtaaccgcagccacgcagatgctaagcaggatcttgccaagtggtcctggctggccatgagctcactatgtagactagactgcctcagtctccgaatagctgtgattacaggaatatgccacctcgaccagacagaactatgctgttgtctttacaaaatccatctgacggtctttgtcctcctctttgctcaattgcttttgactcaggatttgaagcaattgagcggagtcaaaattcagaagcccaaggcacagagaggcagctatgaacaagatcgatccaccttcgacttgactattggtctgcaagagaatgctggcaaagtgttaaatggttgtcctgggtggtttccatctacagaatgtgagacaggagcctacagcagtatgttaccaagctccttccatacagacagaattcatcacagatccctttacaatgagctaaccctgaacgtttcgggagactgcctaggaccgaatcacataataggccccaaaccccagcacttcggtttacaaaacagcttacctcagg

SEQ ID NO: 41 - protein, 1024 aa, Mus musculus
MGAPARKRASLLLLLLATMALVSSPGWSFSQGTPATFGPVFEEQPVGLLFPEESAEDQVTLACRARDPAYWKMNGTEMNLEPGSRHQLMGGNLVIMSPTKAQDAGVYQCLNPVGTVVSKEAVLRFGFLQEFSKEERDPVKTHEGWGVMLPCNPPAHYPGLSYRWLLNEFPNFIPTDGRHFVSQTTGNLYIARTNASDLGNYSCLATSHLDFSTKSVFSKFAQLNLAAEDPRLFAPSIKARFPPETYALVGQQVTLECFAFGNPVPRIKWRKVDGSLSPQWGTAEPTLQIPSVSFEDEGTYECEAENSKGRDTVQGRIIVQAQPEWLKVISDTEADIGSNLRWGCAAAGKPRPMVRWLRNGEPLASQNRVEVLAGDLRFSKLNLEDSGMYQCVAENKHGTIYASAELAVQAPDFRQNPVRRLIPARGEISIPCQPRAAPKATILWSKGTEILGNSTRVTVTLDGTLIIRNISRSDEGKYTCFAENFMGKANSTGILSVRDATKITLAPSSADINVGDNLTLQCHASHDPTMDLTFTWTLDDFPVDFDKPGGHYRRASVKETIGDLTILNAQLRHGGTYTCMAQTVVDGASKEATVLVRGPPGPPGGVVVRDIGDTTVQLSWSRGFDNHSPIAKYTLQARTPPSGKWKQVRTNPVNIEGNAETAQVLGLMPWMDYEFRVSNILGTGEPSGPSSRIRTKEAVPSVAPSGLSGGGGAPGELTINWTPMSREYQNGDGFGYLLSFRRQGSSSWQTARVPGADTQYFVYSNDSIHPYTPFEVKIRSYNRRGDGPESLTAIVYSAEEEPKVAPAKVWAKGSSSSEMNVSWEPVLQDMNGILLGYEIRYWKAGDKEAAADRVRTAGLDSSARVTGPNTKYHVTVRAYNRAGTGPDSADAMTMKPPPRRPPGNISWTFSSSSLSLKWDPVVPLRNESTVTGYKMLYQNDLQPTPMLHLTSKNWIEIPVPEDIGHALVQIRTTGPGGDGIPAEVHIVRNGGTSMMVESSAVRPAHPGPVFSCMVILMLAGCQRL

SEQ ID NO: 42 - DNA, 33294 bp, Homo sapiens
ccgccgccgcacccggacagcgagcggctgaggccgccagggcccaaaggacagcggcccagacaggggctggcggcccggccggccccggctcaccgactcgggcagcatccacctgccccagccaacacccttctctcgccccaggtaggtgccaaccgcttttgtctcctccaacccagggacttccctgcgtgctgttatgggccggggctcccggctcagttcctgtaaatatcccccttgtaacttgggagggaacagggacaggaacactggcaggctggggccgttctgacttctcccctcagccccagggtgggtgctggggctcccctccgccctgtctacgtgggcggcatcccgcagggctctctcaggccgagcctggccgaaaagctggaccccaggagtgtgtccaggaattccagttggccagcgggcagtggcagctgcctgtggagagggcagtttctcctgggccggccctgggcacccggtccaggacaggaccagtccatacagccaggccctgggccctggcctgccccagaagtccctgcatggaattgagccggagtccccagttttgaggtcacccagggtctacctctgcagggtgacctctttgcaaagtcttgcttcagctggatggagaggggggctgtggaagagagaggggagagtggagcacaagtttgggcaagggcctgtccaggaactgggactcggggaggagagtcctgaggccagtcacatcccaaagggcgagaggctggggctaccgggctgaaattcctttccttcccttccccctcccaaccttagcttctcctcaaatccctcccccccatcctcactggtgggagggaagaatttgcacaaagtttggctttccagtaaggaaaggggctggggccagaatggtatggggaagggaaggggcagagctggggagttctggaaagagagggcaatccttctgcccagcaccgtggggcttacataatgggctggaggtggggggcagccccagccagtgagtgtccagagctgaatcctgtcaccttctccaagagggtctctcaggtctgggaagcagcggggcatggagaaggcagtgcctatggaaggggagaatcctgctgctacttggggatggagacgggcaccctctagccccagacccctgggggttgagcctgtgtcctgggggggggggtccagtgaggccaggagggagtggggttgtgcatgccatggccccagccctggagaaaggtgggtttcagcatcttttccctctgctcagaaggagctgggaggaggaacagcccaagaaacccagtgcacaggtgatgttctggtctcgtctgggcaacagtttcggcctcctctcccaaccgtctggccaaagacgcctcagctcacttagcctccgagtctctctacctcctggtcccactcagaggggccggatgagccactggagatcgagtgcagcaaaaggtgggccacctgtgggagaggctgctgtgatcgcacctggacagggagatggcctggaggtcacaacaggtgccctcactcctggccttgggagaagggagctctccccttaaagacagcagcatccaagcccctccccagggtgcccaccagttaacccctttctagccaagctgcagaaccatggacagggcttttgccacaaggtcagagtccttcctaatctcccgtggaagtcctcagcgaataagagggaggcaggaggtgagacagacaggaaagggcccctgacctgatgatgtcaaagtcacccaaggtccacctgcctcacaggtgcagagaccactgtgctcacaccatgagcggtgagggaagcagaggcacactccttatgcagatgagtgcctcagactccaggagtctgctctcattcccggctctttctctcttactctcctcccttcctctactccttctttcctcgcactcccttctctcatcgcgtgtactccaccggcttcagccctcagcctcccgccgccaccatttcccctgccagatttcactccttatgcaactccattccagcaccttctctgccagcagttgttcaaatagagacacatgtgggatgggcctccgaggaattgtgcttaacggggtgattgcacatctcgtctctggctgaccaaacttactccttaggagcatgtacatagacaggtgtaccccaaggcatcctttctgcctctaaagtcaccagggaagcaacgcatttggggtggtttggaggatgcatggtgccctcttcagaaacctccttgagccaaacgttggtgagaaagcgtatttcaaagacaatctctaagcctgagtgtgggtggtatttgtatttttggagggattcctagggcagaaccagggggttggagaagaggtgattgatatgcaggggaggaagaaccagagcaaagaatatgccagggaagccagagggacttaagttagactgcaggagacacttcctggctagaagagtgagccacgaggaggtggggcagtctcctttcagatgactctaaggatggtgtggagaactggggtctggtccaaggttagagagtcctgcctagaggcaaaggttgggctggctgaccctgtaaatttcttccaacttctagtaatcctctttcaaatggtaaaaggtggatgtgactcaggaatccataagaaggcagacatccttttcatcccctcatgcatgctggccaccccctcatccttcaggactacaaccccaatctaaacaaaccacccagaggctgttgctaacctggaacatttatgggagtttctgtgggctccgtatcctgacggtaaccatcctagagtaagtcctctcttagtttgatgattccttgctacaagattagcccatgtttctttgtttaccaaagagaatgcaaacaaaagcaaggagtgtgatattctcatccaaaacctgaacacctcccatcccaggacacactcaggcccaaacgcatctcagtgtcctttttacctaatgagacattcagttcactacgtaggtggggaagtcaaccccagcccctcacacacacccatctagtcaaacctgctgggcttcctccagcctaagcccacatcttctcagtgcctgccaccctgaacaccctgaccaaggggttctcccaccctgtgcctggctggagggcagccttcctgcagtgctgcccaagaggtgaagttaatctggaccccaaatccaaaggaaactagcttgagaggaggagtaggttggacctcacccccaccaggcttaagctctgagccaccctggaggaagctgtctaggaactggggggagcctccttgcagcagagttgggggacatgcagaaattgctctgctaatgcacgaggaaattttcttcctgatttgctttttcagaaacaagttgaaaccattgttcttacgcctggcatctcaaaaagggatccttctaaagccctcactcactgcctcacaccacacacagagcagggcaggcaagtaggaaaacctaaggtctgggggtggctggcttctgatcctgagcttcccaggaggatggaagcctctcttcttctgtccactccctactttaaagggtctctctgttagagtaggtctctcttgcaggggcaaagactctaggctcagatcaagggccagactcccccctgcccaatgctagaagatcaaacaaatccatgagcctgggagccacagctctccccagagggcacgtcagcaccagggctgggcctcggggaagcagctgcaatcacaaagagcctgcagagagagctgagcagctcacagaggggactaaggaaggacggggctgcacgacacccctggtccccattggggctgaggaggtccctatgtccccatttctgccctaaggatgtctccagctcagggtaccacagagacccctcagtcacaatccttcaccccacccctgccagctgcagcctggcctggcccgctgagatcctagcagccctcacccacgccaccacagagccctgtactgaccagaggggcatggggatggttcagaccttcctggaggatgatggtgctgtcccaggaggcaattcttgtcttaggcaaaggaaaaggtactgatcttagatcccatcaggcaggaggtgagggctgttgagaaggagtacctgcttgggagtgcctgtcctggccgcgtgaccccctgagcacattgtaccaggtataactctggcatgggggctgtgtccttgtgccctagtctggggtgctgtgctagtgcttacctatgaccattgcacctttgaggcgtaagaggagggaggcacctgcccaggagattgtgggtttgtcagtctcctaaatacatatgagtgccgcctggacgttgtgactgtatagaagtaagccagacaggcacagtggctgcggacacacggctgtgagatttctcagttctaagatctgatctttcctgagcactcactatgagcctgtgatggtgctgacctcacagcagccccatggggcgggtcctgcccttctcatcccattcttgcagatgggagagtgaggctgggagaggttaagtaacgactgtgataaccaggttatactagttagttttattagggttatactagctagacagcagcaggcaggttgactcaatggcctgccctgttaaccagtgtgctgttttataggatagaggtcaagcgggggcctgaagggctcctcaagtactttgtaggctgataataaatcacttagtctctgcccacagctgggctctgaactcccctttgctaccaccatccatcggaagttgccaaatctctcattgctctccaatctccattactggggagaaggggagacagattcagggccaggagctgggcatcccagtagggagaactctggggtggagggtgtaccttttattttttgactggctccatgcggggggccttatcccagaaaaccttgtcgtgtgttggagccccactcatagccttctgtcccccagctgtcccccaggccctttgtttcctgggactgacaattcagccaactccccctggtgcccccgaaccccccagtggtccactcccccatgtgctggtgccttgcaggaccagcccctgctgatgacagcctgtgcttgcctgtgccagtctgtgcctgcacccctgcaccagggcagctggcctgggcgaggcttggctggctcagggttcgcagggccagctctgggcctggcatagctccactccagccttgctcctgacaaaaaggcctcctccatcctgggcattctagaacgcataatagggcagatggtatggggagatgactgatcggtgaactcatgagcgcattctaggctgcactcgggcggtcggggagctctgtagaggcagtaattttattactgtctcccctgtgcttagcacaatgcctggcacatggtcaataaacactgtgatggaaatggatgcagggcaagactggacgccaactgcctcacctttagggaggcaaggagctccagcctttagcccagactctgcgtgtgtgtgtgtgtgtgtgtgtgtgtgtgtgtgtgtgtgtgtgtgtgtgttcacccaaggctgtggcacacaatggagctcaatatacatctgatcaggctgatgggtctgtggtgctcccccagggcaaccccaggtgctcctggatcccagcccctcccctgcagtctcctctaaggctgtatgtctcgatccctggagggtacccaggatccctgggccggattattcgtgattacccatggtaattacttatggtaatagagataacagataattctgactactggaggtggaggcgaaggatctatgatgcaaacctcctggtgggtttcagggaaacaaggcaaggggctgagtcctcacacccgacacacacacacacacacacacacacacacacacacacacacacagacatacacacaaagaccggacatcatcatacacagacacatagacacatacatacatatacacatatatacatatacatatatgtatatcacacatatacacagggacatatagacacaacagatacccacaagcattacatccacgcacactgggacacagacgcgcacacacacccagctgtcaccaacactgctgtgggagctagggactccgggtaggaatctgctcagaggctatcctggagtctccagcccctggttgtctgtctctgccttgctctggcacattcagtacaagtgcctggagcccaggctcctccccaggccagcaccctgcccccagtgagctcccgggcctgacaggctggcaaagagcaaggagcaaatgatgattgagcaccttctctgtgccaggcatcaggacgcagcacaccagtgccaacggggtgattttccaactttttggagccatggagccctttgtttaaagggaacttcataggaaagtcctgcatataaagcagatacaagtggagctgctctggctggagtggagaaggagtctggagccccatgctctctccctagcctcccatggtggccttgagacaggtccaaacagccccaagacttcacagcagcttgaaaaccactgcagggcactctagcacctcatggaaccctccaaagaactctgtaaagtgcatgttacaatctccactttgcacatgagaaaactgaggcttcacaaggggcattaacctatcccagctcacgaagctgttcagagatgaagtcaatattaacaactcctgtttatcaggttcaaaccctggaaggtcccgacacctctctattctgaggataactccctgcattcgtatagcatccagggacatatgtctgtgatttcccctgaccagatacgctgctgaccctagagctctgagtgtgtgtgtgtgtgtgtgtgtgtgtgtgtgtgtgtgtgacagagagagagagagtttgtcttggggctgcccccaggaagaacggaagacctgtcaaccctatcaagtatatacagactgtccctgacttacagtggcttgacttaaaatttttcaaatttacgatggtgcaaaagcaatacacattcaatggaaaccatacttcgagtatccaacaactactctgtttttcactttcagtacagtattcaatacattacatgagatatttaacacgttattataaaataggctttgtatttggtgactttgcccaactgcaggtgaatgtaagtgttctgagtacatttttttttgaaatggaattttgctcttgttgcccaggctgcagtgcaatggcatgatgttggctcactgcaacttccatctcccaagttcaagtgattctcatgcctcagcctcccgagtagctgggattacaggcacctgccaccatgcccagcaaatttttgtatttttagtagagatggggtttcaccatgttggccaggctgatctcgaactcctgacctcaggtgatccacccgcctcggcctcccaaactgcggggattacaggcgtgagccacggtgcccggccttctgagtacgttgaaggtgggctaggctaagctatgatgttcagtagaataggtgtattaaatggagtttcaacttatgatatttccaactttcagtgggtttatcgggatgtaaccccatcgtaagtcaaggagcatctgcatgagccccatcatgtgtgcccacgcatgtgttcactggctcctggaggcatataatcacagttgttcttgaccagttaaatgcaacatacaaggaacaactatgatgtgccaggtactttgctaggcataggtaataccaagatgaacacaacacaatctctcccctgggcagctcagaaccttctaatggagatggacacagttctacaggcagggtaccaaagctgtagtcaagaacagagtgaattgaattttttgcgtagacaggggcatcttaggcccttcccggcagggatgagacatggacagggccttgcaggagagactgccttgcctaggaagggcattacaggagagtgaagatggatgtgctgggggaatgtcggaggggttgcaagtgcagaatgtcttgagttcaagtcgaactgagagtggcaaggacagggaggggcaggtattttgggagaagtggcacctgggcaccctgcctgtcaatcggaagtggatatgaggctgcagtcggggtggaggagggagtgccatctgctccaacgccccccacccccagcaaaacacccagcttctcggcttccttggccatatccttcctgacgggccctggggacaactctcccttctctccccccaggctcctttgggtgccaactgtggctgtgaaagaggcaggaaaaggttgtggagtggtcaaatgtggagggttgaaagggtttgggagctctcttcctgagaaaatagagtgtgatgtgagacagggcagatcctgagcttgcactggccttcagcccctgcacaggcctgagaggcaatcttaggtcctctgcagccttctttctccacacgggtccccatccaggggacagcattcccaagcccttggccactctgcattctgggagcatcaccagagccagaacactgagatccagagatgggacgggtcttgcaggcagttggtgaaagggcccccagccaggctctctccccaagccctgaccccctcccactgctcttaagtttccgcaaagagggcaggcagagcagagcagcagaatctgcagccgggctcactggcccctgtggaggctctgagcccagtgacccaggttcactctgataaccaataactggaaagcaggcccctgacattccacactcccctctgaactaggaaagtcctcccagggactgggagtgaacggggaggctggctctgcccccgccctcacctcccaagagaaggccccatctctgagactgatgggacaggcatctgacttgctctcagcagctacagggaacaggttcttctccagagctcaatgattgaaccaagcctcagctcatctctgtgcaagagggaggctcctctgggagatgcattaactctttcgacccagaaagcctgctgggccccttcacccatctggttgggggcattgctaatggggccaaggtcatgactccactggcaagagggtgtggacaaatcagtgagacccctcctcactgctaggaaaacaagactgggagacttaaggcagctcccagaggggcttactagcccccacccagacagctgaggggaaggggcagggggaaagtcagccctgagcccacctgccagaggaagatgttactgacttccaacccatgcacaagtcctgttctcttccggcctcgcctcaagagctgacgggcgagacggcaggtgggttcttacctcccaattaatcactgctttcacttcctaagcggcaccccactggctggaatgggggcaggtgggggtacagggctgagccagactcccaggggaccagtaggaggcactcagccccaggaagagcttcttggtaatagccaagccccttcctctggggccctggggagaattagtgcttgggcaattccggcagctccccaggccgaggtaaaagctttacggacccagatgtgcctggagctgggaggggcgctcctcggctcagagccctcctttctgtctgcctccccaggtcctttctcagcctccagctgggctgtccccaagctgagctgaggctcttctcctccgatccccacctctgcccggacatccaccatggggacagccaccaggaggaagccacacctgctgctggtagctgctgtggcccttgtctcctcttcaggtaagagggctcatctgggctttgaagcctagcaggcatgattatagtgttatatccttgctatgatttgggtgacgattacagaaatcattggctctgcattgtgggagcagctagatttctgaggccatttccttgctaaaatttcccatttgtagatcttaccttcctttgagtttaggaggagagggaatatgtctttgccatattatagatgaaggaagaatgacccagagagggtgagtggcttaccctaggtcacacagcaagatgatggcacgccagatctccacaatatcacccggagttgtagcctcaaaggctgcactgtccaatatggaaggtaatagccacatgggactactacaactcagattcaattccattttaaaaataatttcctcaggtgcactagccacatttcgaacgttcagtagccatattggatagcacacagcatagaacatttccatcattgcaggacattctcccagacagggctctgtagtcccctgacatgagcagacagcggtcaatcccactaaaccctggaagggtttcttaaggcaacgctgcatcccagcaaatggaccaagcatagaacaggatctgggaagagatgcggcagacaagggagctgaggttctcctcccaggggagcttccagcttggaggagaggcagaggaaggctggcaggaggggaaggagagggtgaagagggcaggccgagagccacaggccagctggactctggagagcatgtcaggccagaggagccgggccgctggcctgtcctagggcaagagggaggtccccagccgcctcctgctctaaggggtctgctggacccactgcttggcctctgccctgaccctcagcccagatcaatagatgcttcttttctccttaaacatctctgtgggactctccatggtcctggagttctaagcacctcagactccacctcccctaccccacaccccctgcaaggctacagccggtgcatttcaggtcctttgtctcacgagggagggactccactggcatactttcagacgttctcattctgtcctcactgcttcccagtcctgcagctcagtcagtgaggctgctgggaaacagggctgactcagagtgtggggcgagccatccagccccccaggcctcgctacctgtccaagggtccaccagactgggaagagctacagggatgggaagcctcaactgcacagagcaggagatgggcaccccagacggagcagaggggaggcgcctgggcttctagcatccgctccctcagggacacctcagtgctggatccacaccatctgaggaaaggggtatggacagcatccaagttccttagacccagagacacatgaagccaatgaccaaggggctgggatctggtctgccacctcccagagctccagagagagacaggagtggcaaatcccatcgctggcccccacccctcccaggaagttgcctcagctctgggcctttcttgctgccctgtcctcgggatatagctgtggattcctggcactccagtgcaaggaggggtatcaaggatccctctccaccttctcatctctttaactccgttcctctgcaaggtttctgatgcctgtgtttgggggaaaagttaccaggacagggcatcagaaaagaatcagagaggatgaggaacaagaataaggaagggctggcctcgcctgggagagtgtgttttgttgttgttgttgttgtttgcgggttttgtttttgtttttgagatggagtcttactctgttgcccaggctggagtgcagtggtgtgatcttggctctctgcaacctctgactcctgggttcaagcgattctcctgcctcaacctcccgagtagctgggattacagacactcgccaccacgctcggctaatttttgtatttttggtagagacggggtttcaccatgttggccaggctggtctcgaactctcgagctcaggtgatcctcctgcctccgcctctcaaagtgctgggattacaggcagagagtgtgtttttgcatgtgcatgtgtaagcacacacacggggaggctcatgtgtgggtgggtgtgtatgtagctgaagaggcaagtgtgggtgtgtgagggtgtctgtggatatggatggctgagaggctggaggtatgagtgaggtgcctgcatggaggtggtactacgctggggataatgaatgtgtccagaaagtctcacagcacagtgtgaccagctctcatatcccagcctccctgcagaatgcccaggggcattttctaagacttggtctcctgagcctcactccaagagattctgactccttatctgtgagatggagcagggcctctggtggttctgatgggaaacagaggtcaagagtcaggaacagtggggttaagaatgcttgtggtggggtcagcctggccaaggtccaaccccccagatccgctccttctcgctgtgggatctggggcaagttattgaagctttctaactgtcagtttccatgtcaggaaaataagaaaatggcaatacctatcttgtaaagaggttatgagaaggaaatatggagcatggtatgggataaatagtaagcagtccgtctatagcacctatttttattattatgaatgcatggattatatataaaagtctccatggccatctatagctgtgtgtcaggggggaatggatgtgtgtgtaaatgtatgtatcttgccatttgagcagcttagggaggtgcatatgtacgaatgtgtgtatgacatgagcgtgcatataagaaaatgtgtgtaggtgagagatgcgaaggggtgtgtatgtgaatatttgggtgagtggacagctgagagcagaggagaaaggtttctcgggaagaaagagtctgaatgtatcaacatgccctgagcccactcagccaccccatcacccagcgttcctggaagctgctattgtactaggtggttcccagcagtccggctgcctcccagcgcctcctttgcctcccctcccagcagtgccagctggggcaggattcctaccgtacaccaccatcattaacttgggattaagctggactttccagccgagatgatgccgtcaccgcccgccgcctccgcctctgaggcctggggcggcagtgagggagaatggcacaagggatgcctgcaccgggccattcctgggagccctgcctcctacctcattctgagagctgcttagcagctgccctcactcccagggggccaaggctgggcctcagctgcagcatggggccaccccctacccctggaagaggactgatggctggatgcgctgggaaaggaactaattagttaatggggatccctttccccatgacccaccaaggaaggcctgaaatcagctgcgttaagaggtagaagccaattagggatagcctggctcccacctgacaccgcagaagcaaaacggactggccccaccagtcagcagagagcccaccccagccctgtcgaagggcaggtgtgatgtccggccaatctgtggctcttcatcccctgccctgccctgcagcaggacaatgatgcatgaagagagaggagtctgccccatttgcctgtgtggtgctcattggtccaccaagctcaggaggaattgatctgtctgtgccacagacttgctgggtgaccatgggcaagtcactcccttttctggacatttcttgaattgtgatactggaattgtataaaactgccaccaaagcaaactgcccaccctccacccaccataaggcaatccttctcctccaagtccccaccccacatgtggctccagcagacatctgctgagcacactctccgtgcccgccaccttccaagggtttgtctggctgaatcctcatgcagaccctgggaggtgaactcatattcttttcatttcacaggtgaagatactgaggctcagaagagttctataactttcccaaggtcccacagctagtagagggccagcctagtccccaggcccaggcctcgttggtccacactgccccagtaagggtattaggctccagggacacacatcctctctgcatgtttgtggctggcgacgtctcatgcacctcacaccccacagatcagttcttctgtaagggtcccttgaaagccccctgggaggtagaactgcttccattctgaggccccagcatcttgaactttatggcatttgctaccttgcactgtcaatttcctgtctccctccttggaccgcaagccccttgaagaagagggactgtgtcttaatcatctttacaagccagtctctagcccagtgctgggtatagagcaggtgctcaatacctaagtgtaggatgggtgattgattgaactagtatggccagatggggcctgcccagcctatttaaattcaaatttaaattaattaagtaatataaaatgtaaaatgtcgttcttcagtcgcaatagccacatgtcaagtgctcgatagccctacgtggctagtggttaccacattgaacagtgcagaaaatgggacattcccatcatcagagaaagttttactggacagcacagcccaagaggccaggctccagccaggccaaggctctgaggcatctggtggtgtcatcacctgcagcttggagttcagccctgggatcccaaaccaccttcgggcctgtctttgaagaccagcccctcagtgtgctattcccagaggagtccacggaggagcaggtgttgctggcatgccgcgcccgggccagccctccagccacctatcggtaaggcctctgcagtgggtgctgggaggccctgggcagccgttgaactttccctctcatcagccctgccaccaggcaggactcagaggtccccttcctctgtcccctgctgcaggtggaagatgaatggtaccgagatgaagctggagccaggttcccgtcaccagctggtggggggcaacctggtcatcatgaaccccaccaaggcacaggatgccggggtctaccagtgcctggcctccaacccagtgggcaccgttgtcagcagggaggccatcctccgcttcggctgtgagacccgcgggggaccaagacactttgggggagggggagagggggctaggagaaattactgagaaaggataagggacaccctcaagccgggccttcctgacctcacatgacatgccttagtgaactgctgcttctccgtgaaggatgagtcggggaggggctcgcaggccaggaggacagtgcctgagcccctggtctctgcctccagttctgcaggaattctccaaggaggagcgagacccagtgaaagctcatgaaggctggggggtgatgttgccctgtaacccacctgcccactacccaggtgagtccagacctggggccagggttagagagggcacaggaagggcttccagatgcttggcagaggaaggatggaataaaaggagacccctggaaatgacccttagaagcacccatccctgggaccctaactttaaatgatctgtgtttcctttataggtctgtcactttccatcgttgtgccctgcttccgccttcaaactgggtggcccctgagggctgcgatccctggcagacttagcgctccctgagggcaggaataaagtcacttcttccctctaggtctccccttagccccagttcagagcatggtggctgtcaggacagggcttgcagaaccgcaccagcatgctggggtcccacccagagtggccctgttagcccagcaccccctggtttcctcaaactcctcacatcctaggcttgtcctaccgctggctcctcaacgagttccccaacttcatcccgacggacgggcgtcacttcgtgtcccagaccacagggaacctgtacattgcccgaaccaatgcctcagacctgggcaactactcctgtttggccaccagccacatggacttctccaccaagagcgtcttcagcaagtttgctcagctcaacctggctgctgaaggtcaggcttggccaggcgtggctggagggagggaactggaagggtcagcgggcattaggaaaagggtttttcctttggagattggaagatcagcttgcagggcactgattccaggccctggacccccagatcctcctgcttcaaatcctgaggcccttgccccaggcctcaaggagattccacacagctgcctagacagagttggctctgaaaggtgctgagatcccatgcacgggagcacctgacctggagtcatctgcatctgatttgtaaaaccctctctccccagatacccggctctttgcacccagcatcaaggcccggttcccagcagagacctatgcactggtggggcagcaggtcaccctggagtgcttcgcctttgggaagtgagtgtgaagagggaggggaagcagagcacggtctctcgggggcacaggtgaccccagggtgagggcaggcagagtcagggctcttatcttggtgtccctcacagggtctagcaaagtactgggcacacagtgggtatcgaccaccactcactggacagtacctctctgggtgaggcatcgcatatgccaggggccttccatggccaggatcacttggtcttccagcagtgcatggcaggctcagacagcttgagtaacacccagggctggaggcaggcagcacagtgtacagactccaaccctgtctgtctcattcagatcccagctctgccacccgcagaccttgggtaaactgcctaacctctctgtgcctcagtttctttatggtggtgataatagtacctacctcatagggttgtcatgaggattaaatcagttcatatatgtgagatacttagaacagtgcctggaatttagttaagtgttccgtgaatgttaacagtgatctatttgagaatggcagcagaaagtgttctctttctcgtactcctagaagaaggagtcactagaacagggctaagcaaatagcaggtgctcaataaatgtttgtagtatgaaagaaagaatgtgatttgtactttggccccctcctccctcaactatctcctatggttacctgggagaatctctgccttgtgggaagttttgggcttccagaaaatccacatgaaaagcatgtggaagtggggccaggtgcggtggttcatgtctgtaatcccagcactttgggaggccgaggtgggaagatcatgaggtcaggagatcgagaccatcctggctagcacggtgaaatccagtctctactaaaaatacaaaaaaaactagccaggtgtggtggcgggtgcctgtagtcccagctgctcgggaggctgaggcaggagaatggtgtgaacccgggaggcagagcttgcagtgagccaagattgccccactgcactccagcctaggtgacagagcgagactccgtctcaaaaaaaaaaaaaaaaaaagaaaaaaaagaaaagcatgtggaaggggaatatattaacccattaaaactgatacctcagtccgttttagtgcacagattactactaactaaagtccctttcaaagtaggggcaaggcctgccctgtagaggcaacggaaaagagaacccgtaaagacccaggtcacaggccactgtggcggagggcagacccagaggcatggtgaccggtgcgggagagggcaggccagcttcagggtgcagaccccgcagaagcccggcttcactggctccagggttgttgcaggggggatgggtagagcagccctgcctcttgccccttccctgcgtgtgctccgagcctacctgggagaggagagtgaggatcagccagaaggcaccctctctccctctgttcctcccaggcccagcatctcaggagggcctgagagtctgggtatgaggagctgcgggcactggaggggtaggcccagctcagcccacaccctctggctttgtctctcctgccagccctgtcccccggatcaagtggcgcaaagtggacggctccctgtccccgcagtggaccacagctgagcccaccctgcagatccccagcgtcagctttgaggatgagggcacctacgagtgtgaggcggagaactccaagggccgagacaccgtgcagggccgcatcatcgtgcagggtacagagccagggacaccttctccgcccctcccgaccccccttcccgccttcacccttgtccccaaggaaacagacccaaaagtcagggaggagactgggaggccccctgcatgagcctgcttgccctaggactgcactgagtctgggaccagaggaggctagtgctgtggtcacctcagagcttcagtcaggggtgcagaaagcacacaggaggctccagaatgatttaagttgcaaaagcagccactggcacagccacagagtgccagctttcttgtgcctccttcttccggccccctcctctttgtcctctccatctcagaatgctcatggcgccctctgctgtctggcacaggtgctgctgccctgattttctgttccttttaatgagctggaagctcctcctagctcatgccaggttttcttttccgggctcccacagctcagcctgagtggctaaaagtgatctcggacacagaggctgacattggctccaacctgcgttggggctgtgcagccgccggcaagccccggcctacagtgcgctggctgcggaacggggagcctctggcctcccaggtaggagacatggggcttcccccgacacatcacaactgtcctctgctcacttggttccctcccccgcccagaacttcccctgcaccactagtagcccctctgggctaattagggtgtcagagggtggtcctaggaccacctaaggacttcttcccatcccagtcccattgtcacaggctaggcctggatccaggcacagttcagccacaaaagaagtgatgtggtcctgactgggtcacctcacccttccagctttggggaggcctgggtaatctgcatcctgaggttccaggcagccctgaggtaggactggacatatgagccatatcctctagggattatcagcctagagtctccactgctcccacccctgccaacccctcctccctgtggctcctgtggtcctgatccccctgggctctgggctcttctgcacagaaccgggtggaggtgttggctggggacctgcggttctccaagctgagcctggaagactcgggcatgtaccagtgtgtggcagagaataagcacggtaccatctacgccagcgccgagctagccgtgcaaggtaaggggcccagggaggcaggggacatcccaaggacatgcatatggtggctttcagagctctgagtttaggtgtttccaaacacacatgcacataccctgtggccattttccttggttttccaacagtttctaagtaggagaactcagagatttaagaaaggagatgagacacagggttgacagctgccagagggcagggtctctgacttgttccatgtctggcacacagtaaatgtttgctgcagtgagtgaaaaaaacagaaaccaaatcaatcagatttgtgtaacccaaccctttcagctatgtgagctttggcaagttacttagtgtttctgtgtttcagtttcttgattataaaatataggcaataatagtcctgccctcctgggctgctgtatggaacaagtgagatgaaagaggtacagcataaagggcctgcccaccatacagcaggtgcccgggaaatgtaagccagtgctaatatttagttgtgtgacttgagctcactgagcctcagtttcctcatccataaaatggacacagtgatacccaccacatcaggttttagtgaagctttgctaagaagcattcattcgttccttcatccattcaaccactacttactcaacacttcacagggatgaatataaaagatacggtctctgcctttaagtagcttacaatccagtagagggaaagggacaaataaaccccaaatcaaacaattaaataatttcagctagccatcaaatatagtataaagaaaatccaggcagggtgcagtggctcatgcctgtgtaatcccagcactttgggaggcaggggtgagtggatctcctcaagctcaggagtttgagaccagcctgggcaacatggtgaaaccccatgtctatgaaaaacacaaaatttagccaggcatggtagcacacacgtgtagtcccagctacacaggaggctgaggcaggagaatcacttgagccctggaggcagaggctgcagtgaactgagattgtgccattgcactccagcctgggcaacacagcaagacttgtcttttaaaaaaaaaaaaagaagaagaaagaaaagaaaagaaaaagaaagaaagaaagaaagaaagaaaagaaaagaaaacccagtagagtgatgggcgtgagatgggcctgttaggtggggtggtcagagaagtcctctctgaggaagtctcatttagactgtgacctgaatgttaagaagccagccgcgtgaagatctggggaatttccaggcaagatttacagcaagtgcaaagctctggaggcaggaaaagacttcacaacttcaaaagagagagagagagaaaaaaaaaggctaggtgattggaacataatgaatgggggatagagtggagcaagatgcgattggaaaggtggagacttatttgtgaagagccgggcttcactgagtgtgagttgaaaaagctgttcattcccaactgggtggagaaaagattgtagaaggaaggtgcagaaacaggaagactgatgtggggtggcaggggtggtggtgaggggcggagggggggcgcgttgtcaatagtccaggcgggagatttgatagcttaggccagagaaaaaagggcttggttctggatgcattctggaagaggtgctaataggagtcactcatggcgtggcttcaaagggcacgccaagtaacgtcttaatcaagggtgacagtacttttctctgtggctctcccctttccttctagcactcgcccctgacttcaggctgaatcccgtgaggcgtctgatccccgcggcccgcgggggagagatccttatcccctgccagccccgggcagctccaaaggccgtggtgctctggagcaaaggcacggagattttggtcaacagcagcaggtaccacccacaccccaccctgcacagttcctgctcctcctcattctccatggaggccaattcccctcctgtgacaacagtcacaggagttggccagccccagggacaaccatgcctgagttggccacatctgccttgtccttgccacagagtgactgtaactccagatggcaccttgatcataagaaacatcagccggtcagatgaaggcaaatacacctgctttgctgagaacttcatgggcaaagccaacagcactggaatcctatctgtgcgaggtgagggctgccatgtgggtaggccgggggctcagcctcctcagggtactgtcctccccatcatcctgctcctgtgtccacattgctcctagtttggtgtcaaggccaccccaggattcagttttgcttgggaccaccccctggccaccactgagactctggtcatgcctccctgcctgccacacactcatgcagtcctgggcagttgggacctgtgggtcacaccacctcttctctttgctgggccttaggacagagcctctcagcctgccctgcggacccggcctgggcccatttcctcccccatccacccaagggccttgtttttcttggcagatgcaaccaaaatcactctagccccctcaagtgccgacatcaacttgggtgacaacctgaccctacagtgccatgcctcccacgaccccaccatggacctcaccttcacctggaccctggacgacttccccatcgactttgataagcctggagggcactaccggagaactaatgtggtgagacctagggccagagccccatggcttctccctccttctagagagacaggggccccaagatgtccttagccatcctcacctttaagaaacccatagcctaagcgcccccattccctcaggcccacacatggcaagctcatccttggatgaacagctgaccttcctggattccacccagggaccatgcatttaggagagggttagggacaaacctggagttgtgggcagccaccaagacactcccactactgttcttgttagcctgtcccctagggcaaatgatattattaatgtggacagtcattgactgtctcctgaaacaaactttgctgtttagtccccagtggttctaagtgatgagtcgtgattcctcccattgagcagacaggaaaactgagatccagtggggtccatggatgtcatggagtaggggactcccaagcgctgcctcatgtctcatggcctgctgcactggtcagggccggtggtctgacctgctgcccctaactgtccccgtgtgcagaaggagaccattggggatctgaccatcctgaacgcccagctgcgccatggggggaagtacacgtgcatggcccagacggtggtggacagcgcgtccaaggaggccacagtcctggtccgaggtgaggggtttcccacctctacccctaccccaactcccttaaaacccagctgggctgttctgacctgctcgcctcatctcccctcccttccctcaaagctgcggggaagggcttccggcggaactcctgtgagctggatataccctgtggttcttcacaggtcctaaatgatcaggacatttttcttccaaagtcaaagtttaaaaaatccactcctaaacacatcccaagacaggagtgctttactgagccctgaagttttcaaagcctagtgctgggagatctatgcacctctccatgtgacagcctctgtgagctcccccagccttgagacacatccctccacccaacaactggcacccgccccaactgcccacaccccttgcccgccctcccgcctgggtgtgtgttcactgcgtcctctgctgccctgtcttggtactgtaccagctcaagcctggctgggaggaggttggctcaaattggaagctgcccaattctgacccactgtgctctgacctcttggtgcaggtccgccaggtcccccaggaggtgtggtggtgagggacattggcgacaccaccatccagctcagctggagccgtggcttcgacaaccacagccccatcgctaagtacaccctgcaagctcgcactccacctgcagggaagtggaagcaggttcggaccagtaagtgtgagccccacctgggtcagtgctgataaggctcgactgggtgtaggaggtggaaagggtcaaggtttggggatcggggtctgagggccagggctgagcctggagcttcaaagagggacaagatctgtcctctgccagcagagagcatgcaggcaggcaggaagacagtcacacagaaagtaggagagtcgggaaagagttagaagaggaggcgcttggtctatgcccttgaagaattggtaggattgttactggagcaatgaaaatattcatggggacataggggcgtaggcgtgcacacagcattgcagaggcaccaagatagggaaattgagtagtttttcaatcatttctgaaaaaggtactgagtgcttagtatatggcaagtaccgaagtgagggctgggtagataaggggtgattcaggccagtgcctgccctctgcacccagatgaataagcgaatgctggaatatggactccctggtgccttgcagatcctgcaaacatcgagggcaatgccgagactgcacaggtgctgggcctcaccccctggatggactatgagttccgggtcatagccagcaacattctgggcactggggagcctagtgggccctccagcaaaatccggaccagggaagcaggtgagagtcctgtgtgtcccaaaaagctatcatcagggcagagaccctggcaccacttatagggaatgccaagccagccgcaattatgctgagttccaaccctgctcacagggttcagactctcacaaaacagaggaggacagaacaccaagttgggaccagggccactgcatggacaaaccatctagtccaaactcctcatttaaaaactggccaaccttacaactgcatgtgcatctataatttttttaagtttaatttttaaaagtggaaaaaccaaagttcggagaaaggaagagtcacattgacagagcttggacttgaacccaggaccatggggtggtagacagatgtcttcctggaagagtatgcactacagaaatcagttaatgctggctgggcgcagtggctcaagcctgtaatcccagcactttgggaggccgaggcgggcagatcacctgaggtcagaagtttgagaccagcctggccaacatggtgaaaccccgtctctactaaaaatacaaaaattagccaggcgtggtgacacacacctgtaaatcccagctactcgggaggctgaagcaggagaatcgcttgaacccgggaggtggaggttgcagtgagccaagattgtaccactgcactccatcctgggcgacagagcgagactccatctcaaaaaaaaaaaaaaaaaaaaaaaaaagaaagaaaaaaaggaaatcagttgatgtgaaagatgtgtgtgtgttctgtgcagggggctagggaagcagccagtgtctccaagcctttagatggtttctttgggagcagatggaattgaataacctgcccacaaccctcagcaaaaagcgtgtgggtgtcagaacttgagtggagaaggagggggagaaaagaacccaggagagagtaggggaggcacaggctccagtcagcatctgctgagaggctcctgcccatctccgagccattcgcaggggaaggcctggaatgagagcccggggatcctgggaccaggagcatagattaaggaccctgcctcacctcctctacagacctgttgcactggatgtgtagtgagggtccaccttcttgtctgcctgaaacatgttctcctacatgccccagactgactctccaggccctttttctagaatcactcaacatttttagctggtacctctcctgagtaagaaattccagaggcagcactttctttgattgatcctgaacttcttggagggtcaaatgtggagaaatgaggggactcctttattctatttacagcatcccagtagctgaggagcacaaagacagctgtgatgcaaaggaaacatgatgggctttaaaatgagaagggctgagttcagattctacctgtgccatgtattaactgtgtgaccttaggcaagttgattaactgctctgggcctcagtctttccaccctgaaaagggcaataataacacccacctcacaggatcaaatggccaatgtgtttaagtacctcttgcaaattacacggtcctaaactattgtcatcagaagcaagtgaaaaatctccagctgctggattctctacggaaatattttgacccccagccaagttactttctgccaagctgcaggagctgatgaaataaattcctgttttaatatcagccttgtttaatactagagacaattaggagattaaatctgcaacaaaaagaaaaatagataatatatcaccctggagcccaaaagtagtttgttttgtttgtttgtttgtttgtttgtttgtttgcattaactgcagttctgggttatttattccccttattttaaagcgagtgagagttggtctctgtgatttagtttaagttgatggagtaaggaggacaatgatcatgtgtgcatcatctgctctatactaaccaccgtcttgtctaatttcattctcattatggcctctgagagaaacatgattatcttcatggagaagagaatcagaggctcagaaaggttaagtgacttgcccagggaagcacagctagtaaatggcagaggtgggatttgatttcaggactgcctgactccaaagcctatgttcagagggaccactggggggcaaacccagggcccagttgaaggggttcccatcttacggtgctctacaggcacaggctcagggctttcattttttccttgctcattaacaagccatatcggtgtcccttggcccttgacagccccctcggtggcaccctcaggactcagcggaggaggtggagcccccggagagctcatcgtcaactggacggtaagctgcaagggtcagatgtcctcctcctcctccctgacccctctcccgcttgagcagctgcagaaaggaccactgcacagctctgactcaaacgcggataacttcctgtcccccttccacgcacccgctgccccttacgcgaatccacgctgcaggcgtaggcgtccagggccgctactcttggcaaaggttgggtggggccagggaacgggcagggacacatgccgcggaccctcgcccatgccatgctcttgcccctcagcccatgtcacgggagtaccagaacggagacggcttcggctacctgctgtccttccgcaggcagggcagcactcactggcagaccgcccgggtgcctggcgccgatgcccagtactttgtctacagcaacgagagcgtccggccctacacgccctttgaggtcaagatccgcagctacaaccgccgcggggatgggcccgagagcctcactgcactcgtgtactcagctgaggaaggtgggctgcccctgggccccctgctcgtccctaccccagccacttgtccacagggatgtggggtgggggaacgctactcatctcccagctcagttccataggaggaggttgagaggacacctgggttccacatcattggcctcacttccagctcttgctaccttgtctcccttcggggttaggaaaagggaggctctctgggaatagaagtgggccctggagcattgcttggggggctcccactcggccttcatcctgaaggctttcctccaaaatcttaagcaaaggcaatcctggttgggggctgctctgcaggacacaggggggccctgggaatccaaacccattctgtattggtccccagagcccagggtggcccctaccaaggtgtgggccaaaggggtctcatcctcagagatgaacgtgacctgggaacccgtgcagcaggacatgaatggtatcctcctggggtatgaggtgagcaccaacctgggacttgggagaggaaggggtgctggggcttcaaagccaggtgggaacaactcacagaccactaatcattcctcctggcgtccctggttcgctgacatggcaaactgagcatccagtctgtgtagcactgtgaatgcaaatttcactaagaccccatggcaggccaggcgcggtggctcatgcctgtaatcccatcactttgggaggctgaggcggtagatctcctgagatcaggagtttgagaccagcctggccaacatggtgaagccccgcctctactaaaaatacaaaaattagctgggcatggtggcccatgcctgtaatcccagctactcaggaggctgaggcaggagaatcgcttgcgttcaggaggcagaggttgcagtgagctgagattgcgccactgcactccagcctgggtgacaaagcgagactccatctcaaaaaaaaaaaaaaaaaagaccccatggcttatgcccattggggaagacagaccctggaggcagccttaaagtaaatgcttggctagagccagcattggaagctgggagggtagaaggaacaggttctgggaaggggcatggcctgcccctttcatcccagagcccattcaggctggcctgtccagggctgcacagaaaacagcctgagccgctctatggacagttgatcatcctgtcccgggggaatctggggcccagcagtctggcctgagtcctgggcccactgagaactccacaaaggggtacctgtggagcagatggcaagtgatgggaagcaagagggagagaaagaaggaaaagcaagaagaaaccatcaagctgggcctactagtgatagcacaagttcattctagtagagtactctagatttgagtacaatagcttaggcaagccacagtgtggagataattccaaactctgcccttgcctctgcctttgaaagcatatttagcaggtcttcatgctatgattaccatgaaaatgggtttgcatttattaggcaaccttcagaagcttgcttagggccaggggactactttgcaatacaaataagcattttctgtcccttagcagaatgcccacggtagccccccaagttaatgaaatgaaatgggttccagcaggccattgctaggttgagcctgtgccaccagctccctccctgacccatgtcttgagcaccttccttgaactacgcaccaacagacagcagggactcacacccacatggccctgctgtctgggtgctcatgatctagtctccaggttctgaggcctaagactgggtcacagggaccaggatgagcaagagaggaacagaatgtgggggccggggcagccctgagatcctgggcttgactactaccccttgggtacccccgcctccttcagatccgctactggaaagctggggacaaagaagcagctgcggaccgagtgaggacagcagggctggacaccagtgcccgagtcagcggcctgcatcccaacaccaagtaccatgtgaccgtgagggcctacaaccgggctggcactgggcctgccagcccttctgccaacgccacgaccatgaagccccgtgagtctgtctgcctggggtgggggtagggcaatattttggagggtgggtgcctctgagatcattccttccccaatgataagacaaatgctctagcccaccagctctgggctgaacagaaattaggcagcgagcctaatggaaataagggaatggaattcatggcccctgaagcgtctcacacttctccaacctttggattttcatgggctttgttttgtgggcatgggtgacagaatgtgctgggtgtaactgctagaggcaaacatccagagaagggctggttaaaggtgagggggtgcggggtgccagggaaacgtttggacatctctccaattcttcctctctggcagctccgcggcgacctcctggcaacatctcctggactttctcaagctctagtcttagcattaagtgggaccctgtggtccctttccgaaatgagtctgcagtcaccggctataaggtgaggaagcaatcagctaggcccagaatgggaaggaacagctcctctgtgtttccagtgaacataagcagcagcaatttatagcaagaggcatctgagtgagacataagcaaagggtttgtgactgtgagaggaatgaaattcatgaactattctctcagtaacttgcagtagaaactataaaaacgggcagatggtatcactgcagaaaggcagagttcacaggggcagtgatggactatggggatggagtatgggggttcttctagcttaaggagtctacggaaacagttcagtggcctgcaagctttcctccaccaatgaggagctttgtcaatggggaggaggggtgaggaggctggacctcaagagcccagaaccatcgggtctcctcccagtacctaaagctggggatgactcaacgatcagccctggtgtcaggaaactccacctggaaacctccttcccacagatgctgtaccagaatgacttacacctgactcccacgctccacctcaccggcaagaactggatagaaatcccagtgcctgaagacattggccatgccctggtacaaattcggaccacagggcccggaggggatgggatccctgcagaagtccacatcgtgaggaatggaggtgctgctcctcccctacccttatcccctcgagagattcaggatccacccagatacctgagaggatcattcccacccaggccaactccaatctctacccgcaaaggaaagtggaaggcaggcaggaaccaagtgcaaagtagtcttagaactgcctcgccgccacctttctacccagcccccagaacatccccgagggccagggaagggcgcagggtgcagggggaggctgaggaccaaccagcaatagcaaacggcctacaaagcaccgtaggagtcggactgagaagaccacccagccgtccgctcccaggcctgcagctggccctgtgagtctccttaggaaaggtctcaatcttgccacaagggtggggctagggtagtcccaggcccagctgactcagcttgtgctggtttcaggcacaagcatgatggtggagaacatggcagtccgcccagcaccacaccctggcaccgtcatttcccactccgtggcgatgctgatcctcataggctccctggagctctgatcctggaacccctccctctgcgccgcagctggacgccacctccgacggacacagccagccccttcctgctgccaaggtggcctgacactgtgccagagagtggctggttttaaatacctactttaaacagtgccctttttgtaggaggtaggatattttatattctgccgcaggatagaacccacgcaaggattttctttaaattgagaggcaccaggcagtaacttccatgatgacactgacgcctatacctgagctctaggctgcctggagggaaggaacaggcccatgggaagaagggggttttaaaaacatgtcttcaactcagcagagatggccctctgggaccctatacggactccgccacttgagagcagtcctaggcccggcaggaacaccagacatgaacaggttgaagaactggagcgaagtgcacacctcaccatccttcagtctaaggaagaagggcaagccctgggaccaagagctctcccgccttctccctcgagcagcagcaaggaccctgacgctgtccccgataactccctaggggctcctgcctgcccaagcggctgagaaccagcgccccgatgcctgaggctgggagcctgagccccttcagctttgaggggggtgatactccaggctgtttggggtgggagccaaaaagagttgagaggccagggcccttggtggaaaggggcaccagccttggtctgagatagtcacaacccaggtgacgatgccctctcagccaacactgccaacctgaccctgtcatcccgattgacagcgccacttcaggtggctgggtgactaaagggcttgtcttggtggggtctcccacccctccaagacccattctgcacagtccctccagggtttgggcaggagatggccaatcatgcgcccacctctccagtgctgcctgcagtcagctcggcctccccgacctgcagccccagactctgctctcccagcactgactcactcctgcctgggaggggaatgcagcattcatgctgtgtgtcctggtattgggaggtttctgggaagggcagaggataaatgtggccctgcctgctcccaggtatacctaggaccacctggccagatccgctcccagacggccttggactgcttgcatttccccggagaaaaaggggttaataaatgggccatcctttcctgagctctgggtatactaccagtcacagaacgtcagagctggaagaagccttagagctcaacttcttcaagcccctcactttacagatgaggaaatggaggtggtccagagagggtctgggattcccaaggtcacacagcccagaagagatggggctgggttaagaactcgagtcttccacctttctgttcaaggctgtttgtctacccagaggaaggaggcactgctgaatggctatggcctggctaagaaggtggttagtcagtagggtatgaaaattctacttcaaggggttcggattggtgatcatggggattggcatggctgggttccagtccaaggtgtgggcagagcttctaccaaacttcaacatggagggctgacttgaagctccctgtccccctcactcttgccccaagaaaagaggccaaagcaagagcagattccctaggcaagagcagcagcacaactaggaaaccccaaagcccatgctccgacaggtggcccttcacagggggcagcgggacaggcatcttgaagggcatatgtcctcggaagctccgagcctgttttctgtagtttatagttagagctctattttgttatggttttttaaacttttaagtcctgctctattttcctgggcaggtttatgttgatgtttacccactacaattttttaaaaatataagctcacatgccttttccctgccacagccaaacccccactgcaccctacccacccacccctagcccaggtcagctttcctggagctggctaatcaaagcctcctcacctcttcccaacccttacaagcaagggtgctaggggctcagctatacgaccattctccctgacagggagtccaaacttggcctagcatccctcctggcccccctctggccacgacttggcctgtgcctggttctctatcagaaaggggatgctgaacaaaacctccttccaagttttatccaattcgttcctcattgcctcgggctgcatcaggggaagcaggggacaggtgtccagttgctgggccgagggaggagctggtttggcataggacctaaccagtgaagctagaggctacagccactaaacttgcttcaggccaacgatagttactcacaagtaagtaccttaatgctaatgaggtccactaaaaaggggaggaaggcagacctcctgggagacccacgaagggtttttagccagggaaaactgagccccaggaaaacctaaccactgggcaggcagaatttgtttgagggatagaacgacaacaaaataaatgttcctgcagcctgagatttcaggtagagtactgactaaggtttaataagacaataggtgacctgaggacatgcaagcttgtaaaatgcaacagcctcctgctagagtgacttgtacatgagcttgcttgcagaagactagattagatgtttctcaggatcccctcctgcgcaggggttctctgattttcgtgttctctgcccagatgggctgggggagttgagagtgtgcttattttcactgcgatcatgagaccacagttctgggttatctcctctcatacatcaagccccag

SEQ ID NO: 43 - DNA, 3588 bp, Homo sapiens
ccgccgccgcacccggacagcgagcggctgaggccgccagggcccaaaggacagcggcccagacaggggctggcggcccggccggccccggctcaccgactcgggcagcatccacctgccccagccaacacccttctctcgccccaggtcctttctcagcctccagctgggctgtccccaagctgagctgaggctcttctcctccgatccccacctctgcccggacatccaccatggggacagccaccaggaggaagccacacctgctgctggtagctgctgtggcccttgtctcctcttcagcttggagttcagccctgggatcccaaaccaccttcgggcctgtctttgaagaccagcccctcagtgtgctattcccagaggagtccacggaggagcaggtgttgctggcatgccgcgcccgggccagccctccagccacctatcggtggaagatgaatggtaccgagatgaagctggagccaggttcccgtcaccagctggtggggggcaacctggtcatcatgaaccccaccaaggcacaggatgccggggtctaccagtgcctggcctccaacccagtgggcaccgttgtcagcagggaggccatcctccgcttcggctttctgcaggaattctccaaggaggagcgagacccagtgaaagctcatgaaggctggggggtgatgttgccctgtaacccacctgcccactacccaggcttgtcctaccgctggctcctcaacgagttccccaacttcatcccgacggacgggcgtcacttcgtgtcccagaccacagggaacctgtacattgcccgaaccaatgcctcagacctgggcaactactcctgtttggccaccagccacatggacttctccaccaagagcgtcttcagcaagtttgctcagctcaacctggctgctgaagatacccggctctttgcacccagcatcaaggcccggttcccagcagagacctatgcactggtggggcagcaggtcaccctggagtgcttcgcctttgggaaccctgtcccccggatcaagtggcgcaaagtggacggctccctgtccccgcagtggaccacagctgagcccaccctgcagatccccagcgtcagctttgaggatgagggcacctacgagtgtgaggcggagaactccaagggccgagacaccgtgcagggccgcatcatcgtgcaggctcagcctgagtggctaaaagtgatctcggacacagaggctgacattggctccaacctgcgttggggctgtgcagccgccggcaagccccggcctacagtgcgctggctgcggaacggggagcctctggcctcccagaaccgggtggaggtgttggctggggacctgcggttctccaagctgagcctggaagactcgggcatgtaccagtgtgtggcagagaataagcacggtaccatctacgccagcgccgagctagccgtgcaagcactcgcccctgacttcaggctgaatcccgtgaggcgtctgatccccgcggcccgcgggggagagatccttatcccctgccagccccgggcagctccaaaggccgtggtgctctggagcaaaggcacggagattttggtcaacagcagcagagtgactgtaactccagatggcaccttgatcataagaaacatcagccggtcagatgaaggcaaatacacctgctttgctgagaacttcatgggcaaagccaacagcactggaatcctatctgtgcgagatgcaaccaaaatcactctagccccctcaagtgccgacatcaacttgggtgacaacctgaccctacagtgccatgcctcccacgaccccaccatggacctcaccttcacctggaccctggacgacttccccatcgactttgataagcctggagggcactaccggagaactaatgtgaaggagaccattggggatctgaccatcctgaacgcccagctgcgccatggggggaagtacacgtgcatggcccagacggtggtggacagcgcgtccaaggaggccacagtcctggtccgaggtccgccaggtcccccaggaggtgtggtggtgagggacattggcgacaccaccatccagctcagctggagccgtggcttcgacaaccacagccccatcgctaagtacaccctgcaagctcgcactccacctgcagggaagtggaagcaggttcggaccaatcctgcaaacatcgagggcaatgccgagactgcacaggtgctgggcctcaccccctggatggactatgagttccgggtcatagccagcaacattctgggcactggggagcctagtgggccctccagcaaaatccggaccagggaagcagccccctcggtggcaccctcaggactcagcggaggaggtggagcccccggagagctcatcgtcaactggacgcccatgtcacgggagtaccagaacggagacggcttcggctacctgctgtccttccgcaggcagggcagcactcactggcagaccgcccgggtgcctggcgccgatgcccagtactttgtctacagcaacgagagcgtccggccctacacgccctttgaggtcaagatccgcagctacaaccgccgcggggatgggcccgagagcctcactgcactcgtgtactcagctgaggaagagcccagggtggcccctaccaaggtgtgggccaaaggggtctcatcctcagagatgaacgtgacctgggaacccgtgcagcaggacatgaatggtatcctcctggggtatgagatccgctactggaaagctggggacaaagaagcagctgcggaccgagtgaggacagcagggctggacaccagtgcccgagtcagcggcctgcatcccaacaccaagtaccatgtgaccgtgagggcctacaaccgggctggcactgggcctgccagcccttctgccaacgccacgaccatgaagccccctccgcggcgacctcctggcaacatctcctggactttctcaagctctagtcttagcattaagtgggaccctgtggtccctttccgaaatgagtctgcagtcaccggctataagatgctgtaccagaatgacttacacctgactcccacgctccacctcaccggcaagaactggatagaaatcccagtgcctgaagacattggccatgccctggtacaaattcggaccacagggcccggaggggatgggatccctgcagaagtccacatcgtgaggaatggaggcacaagcatgatggtggagaacatggcagtccgcccagcaccacaccctggcaccgtcatttcccactccgtggcgatgctgatcctcataggctccctggagctctgatcctggaacccctccctctgcgccgcagctggacgccacctccgacggacacagccagccccttcctgctgccaagagatggccctctgggaccctatacggactccgccacttgagagcagtcctaggcccggcaggaacaccagacatgaacaggttgaagaactggagcgaagtgcacacctcaccatccttcagtctaaggaagaagggcaagccctgggaccaagag

SEQ ID NO: 44 - protein, 1024 aa, Homo sapiens
MGTATRRKPHLLLVAAVVSSSAWSSALGSQTTFGPVFEDQPLSVLFPEESTEEQVLLACRARDPAYWKMNGTEMKLEPGSRHQLVGGNLVIMNPTKAQDAGVYQCLNPVGTVVSREAILRFGFLQEFSKEERDPVKAHEGWGVMLPCNPPAHYPGLSYRWLLNEFPNFIPTDGRHFVSQTTGNLYIARTNASDLGNYSCLATSHMDFSTKSVFSKFAQLNLAAEDTRLFAPSIKARFPAETYALVGQQVTLECFAFGNPVPRIKWRKVDGSLSPQWTTAEPTLQIPSVSFEDEGTYECEAENSKGRDTVQGRIIVQAQPEWLKVISDTEADIGSNLRWGCAAAGKPRPTVRWLRNGEPLASQNRVEVLAGDLRFSKLSLEDSGMYQCVAENKHGTIYASAELAVQAPDFRLNPVRRLIPARGEILIPCQPRAAPKAVVLWSKGTEILVNSSRVTVTPDGTLIIRNISRSDEGKYTCFAENFMGKANSTGILSVRDATKITLAPSSADINLGDNLTLQCHASHDPTMDLTFTWTLDDFPIDFDKPGGHYRRTNVKETIGDLTILNAQLRHGGKYTCMAQTVVDSASKEATVLVRGPPGPPGGVVVRDIGDTTIQLSWSRGFDNHSPIAKYTLQARTPPAGKWKQVRTNPANIEGNAETAQVLGLTPWMDYEFRVINILGTGEPSGPSSKIRTREAAPSVAPSGLSGGGGAPGELIVNWTPMSREYQNGDGFGYLLSFRRQGSTHWQTARVPGADAQYFVYSNESVRPYTPFEVKIRSYNRRGDGPESLTALVYSAEEEPRVAPTKVWAKGVSSSEMNVTWEPVQQDMNGILLGYEIRYWKAGDKEAAADRVRTAGLDTSARVSGLHPNTKYHVTVRAYNRAGTGPDSANATTMKPPPRRPPGNISWTFSSSSLSIKWDPVVPFRNESAVTGYKMLYQNDLHLTPTLHLTGKNWIEIPVPEDIGHALVQIRTTGPGGDGIPAEVHIVRNGGTSMMVENMAVRPAPHPGTVISHSVAMLILIGSLEL

SEQ ID NO: 45 - DNA, 6137 bp, Homo sapiens
ccgccgccgcacccggacagcgagcggctgaggccgccagggcccaaaggacagcggcccagacaggggctggcggcccggccggccccggctcaccgactcgggcagcatccacctgccccagccaacacccttctctcgccccaggtcctttctcagcctccagctgggctgtccccaagctgagctgaggctcttctcctccgatccccacctctgcccggacatccaccatggggacagccaccaggaggaagccacacctgctgctggtagctgctgtggcccttgtctcctcttcagcttggagttcagccctgggatcccaaaccaccttcgggcctgtctttgaagaccagcccctcagtgtgctattcccagaggagtccacggaggagcaggtgttgctggcatgccgcgcccgggccagccctccagccacctatcggtggaagatgaatggtaccgagatgaagctggagccaggttcccgtcaccagctggtggggggcaacctggtcatcatgaaccccaccaaggcacaggatgccggggtctaccagtgcctggcctccaacccagtgggcaccgttgtcagcagggaggccatcctccgcttcggctttctgcaggaattctccaaggaggagcgagacccagtgaaagctcatgaaggctggggggtgatgttgccctgtaacccacctgcccactacccaggcttgtcctaccgctggctcctcaacgagttccccaacttcatcccgacggacgggcgtcacttcgtgtcccagaccacagggaacctgtacattgcccgaaccaatgcctcagacctgggcaactactcctgtttggccaccagccacatggacttctccaccaagagcgtcttcagcaagtttgctcagctcaacctggctgctgaagatacccggctctttgcacccagcatcaaggcccggttcccagcagagacctatgcactggtggggcagcaggtcaccctggagtgcttcgcctttgggaaccctgtcccccggatcaagtggcgcaaagtggacggctccctgtccccgcagtggaccacagctgagcccaccctgcagatccccagcgtcagctttgaggatgagggcacctacgagtgtgaggcggagaactccaagggccgagacaccgtgcagggccgcatcatcgtgcaggctcagcctgagtggctaaaagtgatctcggacacagaggctgacattggctccaacctgcgttggggctgtgcagccgccggcaagccccggcctacagtgcgctggctgcggaacggggagcctctggcctcccagaaccgggtggaggtgttggctggggacctgcggttctccaagctgagcctggaagactcgggcatgtaccagtgtgtggcagagaataagcacggtaccatctacgccagcgccgagctagccgtgcaagcactcgcccctgacttcaggctgaatcccgtgaggcgtctgatccccgcggcccgcgggggagagatccttatcccctgccagccccgggcagctccaaaggccgtggtgctctggagcaaaggcacggagattttggtcaacagcagcagagtgactgtaactccagatggcaccttgatcataagaaacatcagccggtcagatgaaggcaaatacacctgctttgctgagaacttcatgggcaaagccaacagcactggaatcctatctgtgcgagatgcaaccaaaatcactctagccccctcaagtgccgacatcaacttgggtgacaacctgaccctacagtgccatgcctcccacgaccccaccatggacctcaccttcacctggaccctggacgacttccccatcgactttgataagcctggagggcactaccggagaactaatgtgaaggagaccattggggatctgaccatcctgaacgcccagctgcgccatggggggaagtacacgtgcatggcccagacggtggtggacagcgcgtccaaggaggccacagtcctggtccgaggtccgccaggtcccccaggaggtgtggtggtgagggacattggcgacaccaccatccagctcagctggagccgtggcttcgacaaccacagccccatcgctaagtacaccctgcaagctcgcactccacctgcagggaagtggaagcaggttcggaccaatcctgcaaacatcgagggcaatgccgagactgcacaggtgctgggcctcaccccctggatggactatgagttccgggtcatagccagcaacattctgggcactggggagcctagtgggccctccagcaaaatccggaccagggaagcagccccctcggtggcaccctcaggactcagcggaggaggtggagcccccggagagctcatcgtcaactggacgcccatgtcacgggagtaccagaacggagacggcttcggctacctgctgtccttccgcaggcagggcagcactcactggcagaccgcccgggtgcctggcgccgatgcccagtactttgtctacagcaacgagagcgtccggccctacacgccctttgaggtcaagatccgcagctacaaccgccgcggggatgggcccgagagcctcactgcactcgtgtactcagctgaggaagagcccagggtggcccctaccaaggtgtgggccaaaggggtctcatcctcagagatgaacgtgacctgggaacccgtgcagcaggacatgaatggtatcctcctggggtatgagatccgctactggaaagctggggacaaagaagcagctgcggaccgagtgaggacagcagggctggacaccagtgcccgagtcagcggcctgcatcccaacaccaagtaccatgtgaccgtgagggcctacaaccgggctggcactgggcctgccagcccttctgccaacgccacgaccatgaagccccctccgcggcgacctcctggcaacatctcctggactttctcaagctctagtcttagcattaagtgggaccctgtggtccctttccgaaatgagtctgcagtcaccggctataagatgctgtaccagaatgacttacacctgactcccacgctccacctcaccggcaagaactggatagaaatcccagtgcctgaagacattggccatgccctggtacaaattcggaccacagggcccggaggggatgggatccctgcagaagtccacatcgtgaggaatggaggcacaagcatgatggtggagaacatggcagtccgcccagcaccacaccctggcaccgtcatttcccactccgtggcgatgctgatcctcataggctccctggagctctgatcctggaacccctccctctgcgccgcagctggacgccacctccgacggacacagccagccccttcctgctgccaaggtggcctgacactgtgccagagagtggctggttttaaatacctactttaaacagtgccctttttgtaggaggtaggatattttatattctgccgcaggatagaacccacgcaaggattttctttaaattgagaggcaccaggcagtaacttccatgatgacactgacgcctatacctgagctctaggctgcctggagggaaggaacaggcccatgggaagaagggggttttaaaaacatgtcttcaactcagcagagatggccctctgggaccctatacggactccgccacttgagagcagtcctaggcccggcaggaacaccagacatgaacaggttgaagaactggagcgaagtgcacacctcaccatccttcagtctaaggaagaagggcaagccctgggaccaagagctctcccgccttctccctcgagcagcagcaaggaccctgacgctgtccccgataactccctaggggctcctgcctgcccaagcggctgagaaccagcgccccgatgcctgaggctgggagcctgagccccttcagctttgaggggggtgatactccaggctgtttggggtgggagccaaaaagagttgagaggccagggcccttggtggaaaggggcaccagccttggtctgagatagtcacaacccaggtgacgatgccctctcagccaacactgccaacctgaccctgtcatcccgattgacagcgccacttcaggtggctgggtgactaaagggcttgtcttggtggggtctcccacccctccaagacccattctgcacagtccctccagggtttgggcaggagatggccaatcatgcgcccacctctccagtgctgcctgcagtcagctcggcctccccgacctgcagccccagactctgctctcccagcactgactcactcctgcctgggaggggaatgcagcattcatgctgtgtgtcctggtattgggaggtttctgggaagggcagaggataaatgtggccctgcctgctcccaggtatacctaggaccacctggccagatccgctcccagacggccttggactgcttgcatttccccggagaaaaaggggttaataaatgggccatcctttcctgagctctgggtatactaccagtcacagaacgtcagagctggaagaagccttagagctcaacttcttcaagcccctcactttacagatgaggaaatggaggtggtccagagagggtctgggattcccaaggtcacacagcccagaagagatggggctgggttaagaactcgagtcttccacctttctgttcaaggctgtttgtctacccagaggaaggaggcactgctgaatggctatggcctggctaagaaggtggttagtcagtagggtatgaaaattctacttcaaggggttcggattggtgatcatggggattggcatggctgggttccagtccaaggtgtgggcagagcttctaccaaacttcaacatggagggctgacttgaagctccctgtccccctcactcttgccccaagaaaagaggccaaagcaagagcagattccctaggcaagagcagcagcacaactaggaaaccccaaagcccatgctccgacaggtggcccttcacagggggcagcgggacaggcatcttgaagggcatatgtcctcggaagctccgagcctgttttctgtagtttatagttagagctctattttgttatggttttttaaacttttaagtcctgctctattttcctgggcaggtttatgttgatgtttacccactacaattttttaaaaatataagctcacatgccttttccctgccacagccaaacccccactgcaccctacccacccacccctagcccaggtcagctttcctggagctggctaatcaaagcctcctcacctcttcccaacccttacaagcaagggtgctaggggctcagctatacgaccattctccctgacagggagtccaaacttggcctagcatccctcctggcccccctctggccacgacttggcctgtgcctggttctctatcagaaaggggatgctgaacaaaacctccttccaagttttatccaattcgttcctcattgcctcgggctgcatcaggggaagcaggggacaggtgtccagttgctgggccgagggaggagctggtttggcataggacctaaccagtgaagctagaggctacagccactaaacttgcttcaggccaacgatagttactcacaagtaagtaccttaatgctaatgaggtccactaaaaaggggaggaaggcagacctcctgggagacccacgaagggtttttagccagggaaaactgagccccaggaaaacctaaccactgggcaggcagaatttgtttgagggatagaacgacaacaaaataaatgttcctgcagcctgagatttcaggtagagtactgactaaggtttaataagacaataggtgacctgaggacatgcaagcttgtaaaatgcaacagcctcctgctagagtgacttgtacatgagcttgcttgcagaagactagattagatgtttctcaggatcccctcctgcgcaggggttctctgattttcgtgttctctgcccagatgggctgggggagttgagagtgtgcttattttcactgcgatcatgagaccacagttctgggttatctcctctcatacatcaagccccag

SEQ ID NO: 46 - protein, 1024 aa, Homo sapiens; identical to SEQ ID NO: 44

SEQ ID NO: 47 - DNA, 46625 bp, Mus musculus
  misc_feature (1)...(46625): n = A,T,C or G
atgacgaatccaccaggacaaagcgtgtcagccaacacagtggctgagagccatgaaggggagtttggctgcaccttaatggacctgcgaaagctcatggagcttcgtggagctgatgcagtggcccagatcagtgcccactacggaggggtacaggaaatctgcactagactgaaaacctcccctatagaaggtaaaggccatttcaagggtcggggattgggggcagtgagtaggattttgaaatatttttgtctagcttctagggaaagtccggttctggagatccaataagttgtgtttggtctggtggggagagcacagacctctaaagccgaggtggccactgagggagggcatgaagagctttcctcctctaccacgtttaggaactgtgatctctgagtcattctctcctcctacttctgtgtcggtccatcgtatggagggtccttatttattatgtagatgcacttatcagtatagtcaatgtcctcacttaattagattttgattacggaagagcttaagatggacatcttcctcacactgatcttaaagctcaatggatgagaaaagacgacaggaagtagtattccagccatctgagtaccttactgtacacagaaatgggttggcatatcataaatatgtatttggataaattaatattttctgtcttggagtttctgattttttttaaccctgtctaataaaaaattttccccaccatgtagggtccaaacccagggctttgtacagcgccccgacattaatctgtagcctcagcccactgttttgctttttaatttaagacagattctcagtacattgcccagagtggacttgagctcactctacagtacaggcaggatgtcaggttatgatgttacaggccaggcatatatcttataagctctgagttcaggtatttgaaataatgtttatagctagcctgtagagttactgggattaagtagtacagtgcatatgcacacatgtgtgtttgtgtgtgcatgtgagaactgataataggtgttgaataaactgaatataggccatatgcctggagattttcctagggtgtgaatgcccatgagtttcaaagaaacataatctctactctggttaaggtatgtgtgactgcagctgctgtctgttccctgtgctccctgtcatctctgaggcctgattttagggtgacagtgcttagttgctcacagtcagtcccctgggccttccagcttgtgtctaatactgccttttggatactgtccacttcctgctagctgaagttttattattggtgatggtggtggtggttttattatttgcttattgaaacaaggtttcactcagtagcccaggctggtctcaaactcgaatgaatcatcccatctcagcctgccatgcacgagaacttatcatcggcatgcgctgccacccccaccaccccctactgtgtttgtttccctgggacagtctcactctgccaacaaggctgacctggaatttggtgtcctcctgctttagtttttctaagtgccaggattacaagcatgcaccaccacacctgtcccctgagtgactttctcagggacttctacagagtataggctgtaaggaaagcctgtaccttcttgtgctttcctgagacgatgcaggtgtttacagacctccatcagaagggaagctgaatctttctgttttcctccttttatatttctttgacaaagaggaacttggggatccagtaagctagaacctggggggctcctcaaaacaggatccatactttccttccatctctctaaccctctcatatagctatgacaaatagccttctctaagaagccagcctgttgccagaagaccattcgcagatgcctctcaacctcataggattttgtcacctatgggaggctcctgcagattaataatgggaataaagatacgggagtgaatctagattctagttagaaaccaatatgaaataagtttgagtagactggcgttggggagcattgtgcttaaaacccttcttacgcaggagctgagaggagactctcatgagcctggacatttgaagctggcatggctggggaggggagtggtagtagtaaggaaaatagagcacccctttatccttttatttttgcttggattgataacatgcttagtgtagatagaactctttaaatcatagctcataaggagccttataggagcttgagagttttgacactaacgtgattttgttagcctccgtttatacaattctagaggcagatatgacttagtttttaattaatttttctcactttttattggttaagtttgttgtttgactagcacctaatttcaatattctctgtctaggttaaatggtttaaaggccttgaggtctttgtaccaggtagaaaatgatggaatagtttctattttctgacttacagcctatcgatgtcctgttgcctcttttgtacagaattacagaggacttaagataggttttgccttttaaagggtgttttacttgtgtgtgtgtgtatgcctgagtgagtttatatgcatcatgaaggctggagcctaaagatgccagaagttggtgtcaattgtgagttgacatgtgggtactgggaactgaacacggatcctctgcaagagcagtaggtgcttttaactgctgagctatctttccagcccgggttttgcattttaatgtccgataagacatgggactgagcccagtgtgcatgctaatgctgctcctgcattgcattcatgtgttggagtacagttgctcctcagtctagagtaggttagaataaagaggacctgagagtggggacctgggtgacttcagtatttgactgtgactggccacaaggtttacagagtgacctgaaaagaggagggacatttagagaaataagaaggggcgggaaagatgtggaagaagccacaggctccagcctacatttgtttgtttgtttgatgttatgtgtgtctgtgcattgtttgcatattatgtattcgttccatgtgcaagcctgttgcctggggagttcaaatagagtgtcagatcccctggagctggagttagagatggttgtgagtcaccctgtgggtgctttggaaaggagccagtgctagccatcactccagccccaagctctcagtctttatggctctacataaacaaaagctaagatgaagactgggaactagcgggacactttgtcagtgcgggcttgtcatttagcaccaatggaacccttctcattttcttgcttctttcccacttccaattcctttctttaaaaaaaaaatgtttataataccatattatcaattatgtctaataatgggcttcattacatcattccatacatatgtataatgcatttttatcatatccaccatcaccttctccagtcctcccctccccctccccctcccttcatcttcccagctcatcccccccaatccccaacccccgtctactctcacctctcatgtcttcttcttcctcctcttctcctaacaacacattggatttcaccagagttgtcacataaacatgggtgacaggtcatttacaggagcatggatannnnnnnnnnnnnnnnnnnnnnnnnnnnnnnnnnnnnnnnnnnnnnnnnnnnnnnnnnnnnnnnnnnnnnnnnnnnnnnnnnnnnnnnnnnnnnnnnnnnnnnnnnagggttgggcctcataagcccttcccccatcccaatttttcttatactctagcttgacagcacaccattgtgtaacccagcctagcttcagattttcaaccctaattcctccacacccccttttgttttctcatcttctctctctgctccatttccagaaatctctccaagtcccagagtgcagagcagctcaggtgactggggactagaagagagcccctgttctctaagcttgccccacccagctcggggccccctgaagaagaaacatgtgttgagtctggggtagggttccccttgccttaaggatagcaaaaatgttctccgtgtcgctattccctggtgtggagggaggacgctgggtaagactccttgtgactagatagaagtttgttttctttttcccacatcggagcttcccatacgccccctctgtcagagtaccatagttaggggaaacactgttttccagggagcagatgggttgggaagtgggaggaacttccgggcacagagaagagaggtcagaaaagggagcattaaataaactttgaatgactgacacgaggcttttttcagatggctagagacaatttctattgcatttggatatagataaattctgcttggatcttccatctcctgttccacgtctagcttccacattgtccctccccacataagatgatgaacacagcagttaagatcatctgataggccttccagcgacatgcaacagctaatacctactctgtagatgacctcacattggtgaccatgacagtaggcaccgtccctcctcttacagagcttacaggccaatagaagttacacacaaatgaaaaataattctaaaatactgccgctgtgctgtgtgggggaaacaatagtgttgagggagcatagagcacaggagctaagatgaaggactgaaggagaagaaaggggcttgggagcttgtgttagacccgtttctctgtgttatctaagacttgccagggatactccagcttggccttgctatatggtgactgcatcccttccagagtgctcctagtttacaaagcaagcatctttgccttccctaactactgggtagctgttgggtttagggagatgagactcttctgagaatagccagagggaaaagaatctgtttgaagacagaccaaacatgattatgattatgatttagaggtcattaatgtcaagatttagattgacagctcctgtcaccttaagacctctggggttttcctgtgtactacctagaaatggccatcttcccattatctggaacttactggggttgggcttttcttccaaatccctcttccgccaccatccccggaaaagtgcaggggatctaactggaggtctgccgatgctagacaagcgcccatcactaagctctcacctcggacctgaaacctctaatagcgttatcagtctggacaaaaattgattgatacacacccagtaaatattcacttgtggcacatctgaattgctgttagtccttcaaacactgaaactatttccataataagatacgcaggcctagaaatggacaaagtaaaataaaaagttctagcattttctccctgctctccaacaggtagaagcataaacatacacacacacacacacacacagagagagagagagagagagagagagagagagagagagagagagaaagagagagagcacggtttcagggaaggttagtgaagggaagtgcagagctggtgagtgaatacaatgggaagacaggcacctggctagtttggttttctttcttctctagtattcataatccactctggaataccagtttggcagagctcatggatctgaaaggtgcagcttttcatcctggcctctgccccttgccttctccttggactcctgccccacctctcttaggactgccaagttccttcctagcatcttctctgggcctggctgcagagactagcgttctgtagtccactgagccgccacacctccagtaaatctgctagtgcttgtgtaaggtctcaccctggagaaacaccttggagggagggaaagggatacatgtgcacagcctgattcaaacatctggaacgaggctgctggcctgggtgtgagcggtgtgggccaggccagcggcttcattagagaaattcttaatgctctgtggaggagtgagaggggttcctgctaacatttggaggtagaggatgggaggaatggggaaaatgggggtgaatgaggtgtaagtgccctccctcaccccaaaagggaacgcctctagcacccttgaattttcctgtctggtttaagcttcatgctgagagctgagtgaggccaggagagagctggccaggcccagccccacactctgcctacccttagccagccagcctctcctctctcagagctgagcatctgagtttgctcacacaatgtactaggcaggcgttagagatcttgagagtatagctagaacttctgggcctgagagcggtctctccttttcctccccccccgtcccccgtcccccgtcccctgtcccccgtcccccggcatgggacctctagcctggccagctcagcagctctgcagcaactcttccaagcatttcagtgtgttcttgagtttggcttgccttttttatctatttagtgtttgaatagtagcctcctattccttctgcctctgaattacactccagcctctagtttgaggtgagtgcattgttttttgttgtttgtttgtttgttggccttctagtcacagagatcctcctgcctcacctttcaaatgctgaaataataggtatgctccattcctggctcctactttgactttgacttttttctagttagttagttagttatagtttattttatgtgtatgaggttttattagcacatatatatgtgcactgtgttcatcatgcccggtaccagccagaggaggtcagaagagaccatgagaccccctggaactgaagttagagatggctcacagccaccttgtatatgatgggaactgaacccaggtcctcagcaagagcaacaagtactcttaaccactgagccatctctctagccccttccttttctccttttttaggcagggtctcatgtaggctaggctggcctcaaacttgctctgtagctaaggatgaccttgaacttctgatcgtcatgtctacatctccagagtgctaggatttcaatattgtactgccccctcttattttatatggtgctgacaatcgagcccagagctttgtacacattaggcaagtgcactaccaactgagctatgtccccagctccttaacccattgtgttgccttgagccttcagcaggagggaaagaaaattggtgttccctcactgactgaggcagccagtcgcagctagccttaggagtggggttttcactatttttatttagctcaaaggtgtgagccctgggacaatgacactggctagagaggagcacgtgcatgcaatgcaggaaggtgacaaagcagaggggtaaagagggtgaaggctctggggaaccttgtctcccctgtgttagagctcggatggaggaggctcagggttgggggcaggggcgtgatgaagacaggccctgaagacaaggccactctacaggaacagtgttgtctagttcaatgtcctcttactttgaccttgagtctgtccctccatctcaaggctgggagtccaggacagcatgtccccctggttgtgcctgtattgaagaggaggtgttgggacaggaagggtgttctatgctacttgaaagcacagcatttggtcaggagcactagctggctccatccgcagacacctctgatcttaagcctctcatccccttagaagccttggaagtgctttaagtaggacttgaggatagatttttatgttagaggtgaagactgagaaaggaaccaggtcctcggtaagccaggcaagctctctaccatggagctagtacccagaccttgaaatgtaccccaatgtctattctcatgtaccaaaagaaatgactgcctttagtcaacctcaaataacgtctcccttgcactgtccgtgtggaggaggcttttcatctacctcctctggcaaggcatcataattcagatagctgggaagtccctcatgacctagatccaccctttctgaggctgagctgattctgataaacggtgcctctacccacaccatctttggtgtgaacaggagactaaccaggctctctcgtgcaggagccacaccgctataggctggggctccactcctcccggcctaggtcctgcacaggcttatagcagacacgggtgcccactgctcctgactctggcctgcccaaacggagcagacaccctgcagctcccagcatgcgtgcaggcagtgacttcacagactcacattctctttgcctctcccaacttatgtgctcagcctggttctaagggctagacgcgctctcagtttgggtggggctgtctctctcatgttctctatgaaaatttgtctgagggcgaaatttccccgagaatttctcgggaaaccccttttcctgtgttttctgaatagccttcttgccaagtcctccttccctctccaggaggctgtgtaagtatttgagaagccactgtggagttcggggcccaaaacatttttctgggctggacaagtctttgtgtgaagttaaagctgctgagatcagggctggggagcctctctggggtggaaagaatgaagtggaaagcccaaaattgggaattggcagggctcccagacccacatggctttcctgcgcaacaccacatgtcagagaggattcccaaggctacccaggctaacatccagggcccgccctggcctcctgcggagctctctgggaacctgggcagccacttgacttcttaaggaagcttttgtacagtctgtgtgactgaaggtggggcctgaaggtggcaaatagctaatgggtgtggggcaggtgaaatggctcagtgaggaagggtccctgctgccagatctgatgatctgagtttgatcccccagaccatacatagtgaaaaggaaaaaacaaatttctacacgtgtctcgagcactcaagggtgcacgcatgcgtgtgtgcgcttgtgtgtgaaagaaaaaggcaagagaggagcaagcatgtccctttgaggaaacatctaggtgagggcaagtcccacctttttatatgatctagaatgtattttgttttgtttgtttgagtccagaaaaggtcataggagcctttagtgagctcaaacttagtgagcgcaggcttcatgaatgggctctgatgaacctgatgcgccatccctgaggacaggaaaaaggcaggatcccacagaggcagccctggcttgctcagaggtacacaagtgactgtgtaaacactctggcataagaaataagatggccatttgcctggaagtaccagcaaacagggtaagttggtcacttagaagggagcctccgttgagccctactgttctcgtgtcccaaaatcctttgggcagaggttggcaaccagctgcctcctgtgggtgatacagaccctgcccctgctaatgcaaggagcctgtgacctcttcaagccttagttgccttgagcatcaaattgggttcatgataacttcctccactggctacagatgtttgaacgagaagtgaagtgagcctgctgcagtgcctgccacacagcaatcacttgaacattagcaacgttgttcattactcatccactgggttccttcaccaggcttgagtgtgtgccttgtgccaggtactgctgctataggccttaagaacaaagccaagcaccctgctctggaaggaggtgagcaagcaatggatgaataaggtctccgcaagtaagggatgagaagaccttagagggaagctgtacaacagactggaaaatggtgagcgccacggctgaggacagccttagcctggcggagatggggacagagacctgaaagatgacagggacagccctgggagaggttctgctagggaagggggtggtacagcagcagcagccatgtgcagaaacggaaggaggggtagggggtgtgttccgagagtagaggaaggtatgctgagccagaacgctatgaagactgggaagtgggaagagatagataaacactggaggttcctaagtagccttagaggccaccaaaggtctcggtgcccagcttcactctgagtaaaagccacatcgggttttaagtaagtgagtaacatctttgaaaagatctttgtgggcagaggagggggcaggaggtgatcattagaatattgagaacctgaggagctaggtggccacccctaccctgcatgatgaggtaggttgctctggcagactcaccttggaaagggtgttagtcccttaaattgatatttagtaggtttttagagatgaggttctatagcacaggctgactgggagctcaccatgtggtccaggctggccatcctcctgctttaatctctcaaatgctgaggaaacaggcccgagtcaccacagcaggctctggtctttactatctgacatcccgggtgccctcgcaatactttccggcccttaccaaaaggagggaagaagagtggttccctcccagtgtggtgtgttgtggatcttacatctttgcgacacaaaatcccctcaaaccgatctgtccacccagagctgcaatcccaagctggctcaagccctgctctattcggtcccctggggcaaagaatcagcaagtcccgcctcctggccaccctgcccctgcaagcctgggcacccagatgccctgcccagaacactcctctcccagaccctcccctgcctttcccactgggaacctgacttcccatggcagggcagacagaggaggctgaggactgtctggaaaagagctcaatgagtcttttcgagctttgaaagcagctttgctccccggtggagcccgactgtctgctgagctgcagtgaggggtttactgctgggttatagggccctgggttatagtctcaggcaccgtgtgcccaaacggttccctgtcccttgcctcctaatgaatgaaaatggcctccagccccacccttcacaatatgatcctaactatgccatcctggccgacttcacctagggcctgtctcacactcctctctctcagagccagaaggttctccactccagctgctgctgatttattttgtgagtccccgggagtggaggccacttcccaccctgcaggccatattccctgcgaacttaattgcccattttcatggacctcccccctccccaacttgttcagtggaaagagaatgttcgcccacacaccgagcctgtctgtttcctcgggggttttggttgggaggcctctgtgttgagcgagtgtggagtccctgacatcctgacctccactctgtccttgctccttccaggcacacacatttccttgctttgtgtgaagctcagtggagtatccctgccccggattctgagtgtccttggctgtcgacctgttttcaagacaaagagtgccccaccctacctgtgggggaacccattgaatgggcagccaacggcatccagtgccaaagccatccagtgccaaagccaaagccaaagccaaaaaaaaatctaatttgtcgcaaatatgtgaacaacttaatgaataccaacttggattgactgctaggcgggctttccctaccacctctgactccagacgaggggccaggattctcaggaagctactgagtataattctgcctccccacccccatgctgggagagaaagggagaggaagggagagagaggtgttagggttacatgttctgttttagtggggaaaatgctggtcgtcattaactgtatagtatctagaaacttcgtaaccttgcttggctcttattcagcctgagctgcaatactttgtctagttgataccaagtacttagccactgagtaaagcagcttgctgggggttgcatgagaaatggaaaggcagggatgatacaactaaggctaccttgccttgagagttctacttcagtgatctacagctcctagaacttggaatgaagacacacgggtagcctctgcctccacctgcatgaccaagaacaggtagctagttctttctggcccaagcacgtgtgagccggcatgttcgggtcattgccagaatttgcatactcctctgaggaaagagtccctgtgcatcccaagaacattcttgtgcttctgttcttagagctagggccttggtgtgcaccacagcccccaaggaacagatgacatttacttagcctggtcgctagaaacaaaaggccctgtcctgaggccagcttgtctcccgtattcatttataaacttttaaagccctgaacaaactgggctggttgagcacgtgctcactgctccgcagccctaggaattataactggacatggggtctcttagttttgtttgtgtgtttgtttgtttgtttgtttaatgtcttttacaaacccctacactggtttgtaagtcagaccacatacagtgatgtctttcaaagcagttagccctaaggtacctctcagaagggccctctggaagaaagtgagccttttaaccatttttacccattgttcaagtcaacctatcaagacaagcctccttgtcctctgcttcctgcctcctgcctcctgcctcctgcctcctgcctcctgcctcctgcctcctgcctcctgcctcctgcctcctgcctcctgcctcctgcctcctgcctcctgcctcctgcctcctgcctcctgcctcctgcctcctgcctcctgcctcctgcctcctgcctcctctgcctcctgcctcctgcctcctctgcctcctgcctcctctgcctcctgcctcctctgcctcctgcctcctctgcctcctgcctcctctgcctcctgcctctgcctcctctgcctcctgcctctgcctcctctgcctctgcctctgcctctgccaaggctagttttccacctttccccgttctatgcgccacaaagcctcgatgcaggatcaagtgtgggctgctcaggagttgtagttcttttcggtaaagatccatccaccgttgctgacaaggaactcctgccttatgctagattctggcttttacatcttggtttcaaccacgacagtcttgctggtcggacacttaggaaaacctgcatcgtggtggtagcacccacatcaggcagctcgcaagcacttgtgactcctgctccaggagacctgatgccttcttctggcccatgcaggtgtacacaacatggaatatactttcacagagagacacacagacaaataactaataaataggcctttaacttgacttctgatatcactctaccctgtgccttcctctttctgcctctctctctctctcttgtctccttttcaggtctatctgggaaccctgcagatttggagaagcgtagacttgtttttggaaagaacgtgatacctccaaaaaggcccaagactttcttagaattagtgtgggaagccctgcaggatgtcacgctcatcatcctagagatcgcagccatcatctccctggtcctgtccttctaccgacctccgggtggagataatgaaagtgagtgtctgagctgctgcccatggctgatctgagtcctttccacaccaccaaccatattaagtaccagtggttttcaggttatagtacaaaatgttcttcttacccagcaggctctacaaaagagagctagtaagccattctcctaaccgttccccttcccctaccacatccttattcagaacaccagccatcttgtgtccttacctttgcttcttagtgtatcccaaccataatgattggcattgtgggaaatagcagtgagcctggctgcacatcctgtgacttgcattggcatactttgtgctgtttagtagctaacacaaattagacctagtaatgatgagagatcgctccagccgactgatttccttggaaatcttccacttcagagtctaattttctattgttctctcttcgtgactgtccaccttgtggaggttgtgtaaatacctccctcgtttcaatgattctttcttccctttctggatagtctgtggtcacattgcaagtagcccagaagaagaggaggaaggagaaactggctggattgagggggcggccattctcgcctcggtgatcattgtggtactcgtgacagccttcaatgactggagcaaagagaagcagttccgggggctgcagagtcgcatcgaactggagcaaaaattctccattatccggaatggtcagcttatccaactcccagtggctgagattgtggtgggagatattgcccagatcaaatacggtgagagcaccatgtttctctagccaacaacatccccctccccagacatctgaagaataggtccattgacatgaggagctgggagtttctgaaagcctctgctaacccgtcagtgagaatttaagggggttgtgggaagaaattctgaagaaagccatagccaaaactcgtccaagtcagacttttgtcctgtatggcttaggagtaaaaatatggaatatttaggctacaggaaggtgttgattcaagatatgtgtggcactaaggatcaaacccagggccattgcagtataggtaagccctctgccacagagtcccaacgcagctctagagttatatcctttttacccctttatgtggaggctcttgacattctcatgagaccataaggagagcatccctaaggtagagtggaggagttggatggaggtccgtatgactatcccctaccaagtcttacccgttctcccttattgtcaccctttcccttatgcactaggtgacctgctgcctgcagatggaattctaatccagggaaatgatctgaagattgacgagagctctctgacaggagaatcagatcatgtcaagaagactctggacaaagaccccatgttgctctcgggtatagtatctggttgcccaggtttttatcacagcctctagatagtagggtcaagggttcggggatctcttccctctattggctccaagctttcttcttctcttggtttgagtcagagtagaaacgtggttattcctgatgcagggatgtcagtaacctgaaagacgtttttcattaagtgttacaggagttctgttgtttgagaggatggcataaagttaatatgttaaccttaacctctgtctccttggcctgttttaaacaggctcatctagctttttcttgctgcctactaaattaattacaatccacagagaaaagggagcaccatgctcttatgtttgtatttcctaacagatcacagctaagaacatcagacagcactcatccctctctgccttctcctttcccttctgtagggactcacgtgatggaaggttctggacggatggtagtgactgctgtgggggtcaactcccagactggaatcatcttcaccctcttaggagctagtgaggaagaagatgatgatgacaagaagaagaaaggtaaggggcgtgccgaatgagattctctcatccctgtgactgaactaaaggtcggagagcagatccagacggaagagctgttaggaaagtctgccgggacaaagcaacagatacccagcctcctaggcaagatgcaaatgtcagttgtgaggctggagaggtggctcggtagttaagagcacatattcttgcaaaggaccgggttcagttttcaggccccacattggcagctaacaaccatctacagctctctagttccagggaatcctgtgctttcttctggcctgtgtggacaccaggcaaacccatggtacatagacatatatgaaggtacacacacgtgcatacacacacactcgtcgaccttgtgtctctgaggagcaccaatgaaaaccatcgaaccctgactcaaatccctcaggtcagattgcatttcctcagtccctgtgtcttcggtaggttgtgaggggtagcccagcctgaaagagcaggcaagagctccagccaaactgcctccatgacgtcctcctcttcccttcccttcttcctcaaggactgaggggtaaaaatgaactatcccagctaagagggaagtgacttaaagcaaaacatggatcccacagaaactgtgggctctccgctgaagacaggcacagctggaagatagggagccaagagactatgttcatcccgcaattaccctagtcttggtcactcacttcttcctgaggtaggaacatcaggagaaagagacccagatgtgaaagccagactcaggcctttttttgagcattccttcttcctgtgggaagaaaagggtttctagcacttggctgagaatcatctgaggtacttagtagagagaagcttatgaaagagtaacactctctcagaacccaactattcatttttacagctgccctcagctgaacacctagaaagcttgcctagggcctgttgaattgacctgaagatgcattttagggcctcgccacagacagctatctccagcctctctctccctaactcccaccctcattttctcaagagctgtgactcaagacaggagcatcctccctcctagctgcaggagaagctcaggcatgaccgtgtgtgcagctgtctgatgcttggctcccagggatccatttgaatcgagataggaaggatgactgagcagagacgtgagcttccgttccaagtatctccctgccccgcagacctcctccttcactgtcacccttctgtgctgggaaaggacagaattggatatcagatcatctctttattctagttactttgggtctccaccccgctttttctttcttgttcaaacaggtaaaaaacaaggagcccctgaaaatcgcaacaaaggtaacctctccacccactcacgttccatctctacctgccacgctcaaaccagacctctccaggccatctgcctccctgccctctccataatctgttatctgctgctgtggcccagtgcctcatcctgaggatggtgcagagatctgggggtgggcttcaggcagaacagcagcaccctctgctgttagcttgaggaagcaatgtccacaattctttggtaccgatccgctcttctcagcgctgagctctgcttcactgtccgcggcagcggcagtttctgggttggaagtcacggtggaaggtgttggccaggcagtccctgcaccctcctctgctagccgcctcatgggtgtcttctggtttgtatttcttctctgttcgtctgctctgaggctttggaaagagacatttccctctgcctctctgcccacttctttctttgttctcaccacagtctgttttgttcctcctgatatggtttgtgtttctcttggtggctgtgtctgcatcccatctccgtcttgtttgtgcatccgacagaagagaccgtaactcaggagggagttcctaagcaaacagtgacgttggagggggacggggaccagcaggaagtagtcttgacatggctcctaaagtagtttttcccccattacacacatcatagtattcttcagaaataaagtcaccatattggatcacccgggcttaaggagaaagaacttgaatttcaggtctctttattcttcttccaaaggggaaatcctgggtttgatgtgcccgtgctctctgctttgccttcctctgtgtctttagagcagcttctattcttcaccccacccccgccccaaaatactcaactcaggtcctgctctgtacctccttcttcccttgtccttcaacttttatagaagctgaaaaataactttggtcttgggaggggtggggtgagcatctgtctttcttccctgattgggggaagtgggttttaacagaatagactagggcccttatgttctagaaacatcagccctttgatccctttctacagtaaacattccctgttttaaggtctggattccagagaggatgcttagtaaggggatagatggcctccatggtgtgatcaatccccttgttgctataaacctggcctgtggctctgagggatgccaggaagttgtggtaaagagaaaatccagaccgagaagcatcttcgacctcatctccagttgtcagacatgtcccaaaggccctagtggagtcctgtgtctggcatgggtgaggaccagtcaggggtctaaggaacattccaggaagagacagaagggcatcttgccttccacctgcctgccatccactgctatattcttgcctgctcacttgctctgtccgtgtgtctaccctagcaaagacccaggatggagtggccttggaaatccagccactcaacagccaagaggggctcgacagtgaggacaaggagaagaaaatagccaggatacccaagaaagagaagtcggtgctgcaaggcaaactcacacgcctggctgtgcagatcgggaaggcgggtgagtggttaagcctgcctcccattgcagatttgatgtgatgtcgccacatgtgctggctgcttcaccacatccagcaggactggccctcaggtggctcctgagctccagagagctgtatctttggtcactgttgggttttgaagggaagagatttcctcctatgtagaaaggttaatagcctgaggtctctttcatacaaatattgggggggggggctgtcatgctaacaggaaggagaccttaagaactttcaactgtcctggaatccttccaaggacagagtttgctttaggcagttccctccttagttgtggaatcttgtggcccagcacagagcaataaatacacagtaaagatgtggagaccaaggaagactgcttagtctattcaactctattcacaagaggggtcttatagccagagtgacaagtggcttctccatcacccacccctacccttccctcccatcctctggccaaggggaacagcaggaaaaggaaccttgtgcagtgtcccttgaggtgtggtctgtcagtgagtattctgtgacctcagacttctgcttgccaccaccatattcagcctgcttctctgggcacaattctccagatgtccttgctaaagtgcagactgccttccgaaagtctatggcggggcctgagagcctccaaagatctgtgatagacacaacagcagcaaccgtttacagcctgctcctgagtagccacatgggtccagtagctgtctcactggacagcaccaagtcagagcatttgagtatcccagaaagttctggagggagtgtattgacctaaccaattcagtctggtccagtacttagcttattctgactaccttgaaatcctaagtatagactctctgtggatgagctgtgagtacaaaaggcaatcgttgagccaggtacccaggtcagaaacatttaagtagatctcctgagccgcattcttccttggggataagaattacctagagattgcccactggtctccagtttcttatttcacttatcaatctagtctagggtgacacaaacaagatgacttccaacccagagagagagagagagagagagagagagagagagagagagagagattgattccctaaatttactataggtaccttgcttccttacgctagtcctagccttaatcaatccaaagccaaactaatctgcttccattgacattatcccccatggcctttctgtaaagaaagcccctgaagcattgatatggctttaatacgagtgtcccccaaatactgtactgctgctaggtacacattaatccttagccctcaggatagccactgatttccccccaaacatgtaagatgacaagctttcccacgtagttgaaactttctttcactgaaagtcccagaaattgctgtgtcttgagcaaaccaggatggccaccctgccagtgtcttctgtctctgacccctagcattctctttggaacagtacgaacaatagtagctatctcctagggctgtagagactcagctgtgaaggccgagacctttttatgccatgctatgataggagaaatcatgtaggtgacacgtgctagcactgtggggacacactggaactagcgtgtggaactttcaagagggaaagtcaaagccgtaagctactaagtgggcagacgcagttgctgctcggtaaattctggaatgcaatcataaaatgtaggccaccttgttaacggaacagaagcaagcagcggccgccagtccgtgtgtggctgtagctgacacacagtccccttcagacgttgcagtttattagaagaaagggcctcaaggccatgactcagtaagagaaggagcatcaggcccaatctctgaacaaatctcaagaacaaaggaaaaaattaaaaatgggggggacgggacgactatgtcaggaagcttcacactgagggatttaacgttcaatgtagcacgcatgatacagagcgctcaagtctctgtggcctgcttcttagttctctgtgggcggtggggtgggcctagttctctgagtggaggtgcaacctgatctcttcgccttgtggaatgcagccatttaaaagtaaggatcatcttttaggaggaagcgggcgttcctagcgtactctactctcttttttgtttgtttgttttatttggtcgggttttaggggtttgggggatggaggggtaaattaagctgggctgaacttatgatcatcctgcctcgtctcttacgtgctgaaattacagatttatgccaccataacccagcaagccctcttatttatgactgaagttaaattagcaactcaacccatagaggtttaacaactaacacaaggatatgagtcaggttggtgatgggctaagaataaaatctgtatctttgatatctttggaaccactgtgattaaagactttgttttttaaaaaacaaaacaaacaaacaaaaaaaccctctaatgtcattgtatgcaagcaacagaatggggagaagattttaatataaagcttatagctttaaaaattctagaaagagcagagcaagctgacccctgtctgtgtgtcttgttgccctggacaggtctgatcatgtctgtcctcacagttgtcatcttgattctgtactttgtggttgacaatttcgtgatccagcgccgagaatggcttcctgagtgcactcctgtctatatccagtattttgtcaagttcttcatcatcggagtcactgtattggtagtggctgtgccagaggggctgccactggctgtcaccatctcactagcctactctgtaaaggtaagcctggaaaaatgctgctccttcgggacagagacggaaagggaggggaccttataccgttcgactgaaggataaactcttctgccctttagacactttagagagtcccccatgaacagaaatccttagctctggaaaaatagccatttccgttggttgtttaaatagctgagtcaaatcttcaagtaatggtgcagtgcatctttgtgcaggactagaactcaagtgaaaaaatgtggactaggacttagccttcggcctgcgcctgtgggaaccccgttggtcctctttcaactcctttctctttcctttggtagaaaatgatgaaggacaacaacttggtacggcacttggatgcttgtgagacaatgggcaatgccacagccatttgctccgataagacaggcacactgaccatgaaccgcatgaccgtggtgcaagcttacatcgggggcactcactaccgccagatcccacagcccgacgtcttcccacccaaggttctggagctcatcgtcaatggcatctctatcaactgtgcttacacgtctaagattcaggtaagctttgccatccatcgcctgggtgcccagcatgggtgacggagaagcaatactcaactctgccagaaacaaatcttctgttccacttacttttctatggctgtgctcgtacaccatgaccaaagcaacttatagaagaaggtgtttaggggctggcgagatggctcagtgggtaagagcacccggctgctcttccgaaggtccagagttcaaatcccagcaaccacatggtggctcacaaccatcccttacgagatctgactccctcttctggagtgtctgaagacagctacagtgtacttacatataatcaataaataaatctttaaaaaaaaaaaaaaaaaagaagaaggtgtttagtggagggcttacagtttccgagggttagaactcaatgactatcatgacgggaaacgtggcagcaggcaggcaagcatagcgctggagcagttgctgagggctcacagctccatccacaagcaagaggcagagagcacactggggaggacatgagtgtgtttgagacctcaaagaccccccaacacccattgacatacctactccaactagggcttacccccaatccttcccaaacagttctgccaactgaggacctagtattcaaatatatgagcgtgtgggggccatgcaggctcaacccaccataccctctatcattcatcgtctgagctgccatcctgcattctgtttcctgttcctgactgaacatgttcggggtaaacatatggcagtgtctacagcagagttgcacttacccagatttaattattcatttcccagaaccagggaattctttagaatatgacttccaggacatgagacacctcattaccatagagtagctgtaaggtcccaagacctgtttgactgtgagacaatgtcacctttgaaagaacagcaaatggtgcctcccctgtgggcactggtatacctaccgagttgacctgcccaagtcttctctctggtccagagctctcacccattaattctannnnnnnnnnnnnnnnnnnnnnnnnnnnnnnnnnnnnnnnnnnngtttctgtttttcttttctctcttagcctccagaaaaggagggaggcctaccccgacaagtaggcaacaagacagagtgtgggctgctgggctttgtcacagacctgaagcaggactaccaagcagttcgcaatgaggtgcctgaggagaagctctttaaggtgtacaccttcaactcagtgcgcaagtccatgagcactgtcatcaggaagccggaagggggcttccgcatgttcagcaagggcgcctctgagataatgctgcgcaggtgagcccccttcctcccgttttcccctttgagatccccatcccctcccaagaatgtctgagggacgatgccaaagcaggctgaaggatgagtgaccctgcagcccggtagtgacatctgagcttttactcaggacaatcattgcttttaggaactttgctgactcctttaataaaccctcacacctcggcaaggtggtgacccattttgacccgttttacagatgggaaataaacacagtgaacttgcacaatgttctcagagagagagcagctaacagtgccacagtcaggattcagcctggaccagcctgactctcccatttcctagtgagttcacagaggtagtcaggatatgccccatgccaccatgctcaaaggagctggtgagcatacgataaccatgtgcctctctccccaggtgtgatcgaatcctgaacaaggaaggagaaatcaaatcgttcagaagtaaggaccgagataatatggtacgcaatgtcattgagcccatggccagtgaagggctccggactatctgcttagcttaccgagattttgatggcacagagccctcgtgggacattgagggtgaaatcctcacttcgctgatctgcattgcagtggtgggcattgaggatcctgtgcgcccggaggtaaggcctgcccgttttttgaagtgaagagaaagggccagaaagcaggagcgcttgtctctccgctgaccactgcttagggtccagggtccagtgtaaaccacacgagccacctcggggggtcacaggaagcaggtgtgaatttctggcctagccacgaccccagacacgttgcctaactacttgtcacttacagagacagacgactctccaatacctcctttccacatcagccgtggagtgccaagtcagtagaagacatcatccctagggtttatggtatccaaggggcaggcagtgacaattttgttgggcttattacttggtaagtaggaatagtcaggggcagaattaaccagaagacaacttactcttcagctaccttctttcaaccgacatattctttcctgagcagtccctgtgtgcagaacactattctgggtgccaggggaatttcaaaagctagaatggtgagggtgtcctgtcatttcagtgagctcatgggtgggagcctggaccacatgggcagagagtggatagagctgcttctggggaggagatgagcggccacatcaccaggcgctgcccacacctcccagggaccctgaagaagaaggagacacgtctgcctcccaaagcaaattccccttcaacctaggagatcatgagtgaaatgtaaatgtcctctgtgagctgaacatattagcaaggggacactgagcactataaagaacaatcagagagagcccctgttctgtctccactggagcgagagctgagccagagccatagatcaccaagctcacagccaggtttccttttcttctttactccccttaggtaccagatgcaattgccaaatgcaaacgggctggcattactgtgaggatggtgacaggtgataatgtcaacacagcccgggccattgccaccaaatgtggcattctgactcctaaagatgacttcttgtgcctggaaggcaaagaattcaacagtcttatccgaaatgagaagggtgaggtgagttggtggagggagcagggaggggagggcacgactttcaagggcatgaagagctaggtctagtgtgcagcatctggggcttgcaggagcacatggctggcttctaaaggaaaatcaatccatcatgagacatcccttccccccacagctgctcgtacagtgagcagggtgtcctcttatctttgttcagtttgtctctatgggagacagaatcactaacttcattatctctctgtttctttaactcaaagaataatttttttagccgggcagtggtggcgcatgcctttaattctagcacttgggaggcagaggcaggcggatttctgagttcgaggccagcctggtctacagagtgagttccaggacagccaaggctacacagagaaaccctgtctccaaaaaaaaaaaaaaaaaaaaaaaaaaaaaaaatctttgtgtgctgctttcccctacctcacccctccaatgtcacctccctactatggctgtaggtgatacaggcttgtggttgaatgcagtatttgaagataaaatagacgaatttttcctgatctgcatggactcagacctaagcccccagcagctctgtggtagcctcctgagccaggggttaacttgaccctcctcctgtaaagagactaagaaataagaatgggcttccatatagaaaattgagagggaaaagaagataaagccctgcttagtcaccatcagtgaagccatactgactttttcatctccctggaggccagaggataagggtccctccatggctataaatttccagtactcttggaagctggggtcatgtggaggggtaagattttcctgaataagctgctctgagtctgactgatagaggtgcctctggtattggcaggttgaacaagaaaagctggacaagatctggcccaagcttcgggtactggcacgatcttctcccacagacaagcacacattggtgaaaggtgaggtccgtctgtatatagcctgccagaaaggagggaagaccagggtaaagtcagataaagagccatccttggccaacctggagatgtagtcagtggcagagtgcttgcttagtatacacaaggccctgagttcaagtcccagcactgctctcaaagaggaagaagaggaggaggagaagaagaaggaagaggaagaggggggggaagaaggaagggggaggaagaggaaggaagaggaagagggaggaaggggannnnnnnnnnnnnnnnnnnnnnnnnnnnnnnnnnnnnnnnnnnnnggaggaggaaggggagggagggggaaaggaggaagagaaaagacatacccattgaagagttaagcctgatgacatacacctgtgatcctagaatttaagaggtaaaggcagaaggacccaaaattcaaggtcatcttcaacaacatagtgagttcaaggcctgcctagctatgtgggaccttgtctcaaaatgaaatgagccatcagccaaactactttcctgtccccagtaaggagtcttaggagtgagtggtcccaggctagtggggacaacattgagtttggcaaacatctgagcccctggcaagtttgtgatagagttgagctttttggcttgcagtttagtagggtttgggagttttttagttgttgtttgctgggaagaggagctagtacagttctcatgtagcccagattgacctcagatcccctatatagctgaagatgtccttgaactcctgatcctcctgcctttacttcccaagtactaggactaatgggtaggccatcacagctatctagagctgacagtaggagtgttagtccctagctggtaaggctgaagtggtttccttgaactcagatgtctgaagtggtatccttgaactcagatgtcaaagccatctcatgctttcccagctacctagcaactgtgtaaggcacaagaccaaggctacctttctcggttcagagtgaactcagcgaatcaattgcctgtgggtggttactgtcgacccagcagcaaaaagacaaaggaaggtgagagagtagaggcagaatagtagagacaggggagaagacccaaggtgtcccttttgggaaaagcagtacttaccacatgtcttcaggtggcacgcgtgtgttcactgtcgtgtgtgtctgtttttcccaggtatcattgacagcactgctggggaacagcggcaggtagtggctgtcaccggtgatggaacaaatgatggacctgctctgaagaaagcagatgtcgggtttgctatggtaagctccccttgggtcaccttctccatcaggagccaagtgtctgcttccgatgccttcgaatcctgcctgtgctcctccacctgcacccacccccccacctctgtctcctaccgacctggccagtagtgtgtgtgaaaaccagacgatggttgttcagggaatcacagagtggcttacctggaaaaacaagagcactgtggtgacactgtttgcctggatgaatgacggaaaagtcagcttccacagagaatatggtccgcgccatgctcctcgagtgggaggtcacgagtatctgagtcttttagcaagttcctttaaaagtcaaatattccaaagacacaccttgcttcttcagtaaggtggggtaggcactagaagcattggggggcctggtttggttgggtttggtttaaggcttttgctggtggtggtggaggtttgatggttgttgcaagcacagcagcggattctggagcttcagaatacaaagcccaccctcacactgaaggcgcttattgctcccaggcctccagccacagctaactgttgtcggaatctaagcagtggaagggaatttaggaaggggtgtgtgtgtgtgtgtgtgtgtgtgtgtgtgtgtgtgtgtgtgacacagagagagagagagagagagagagagagagagagagagagagagagagaggagagagagaggagagattggagatgcacacctgtaatcccaacatttgggaggttgaggcaggaagatcttgggtttaagaccagcctgtcccacaagcagttccagaccagcttggatacacagcaagactctatctcaaaaacgaagaaaataacctatctttgtggagctctttttttttaaagggggttggttatagtgtttttgtaataacgtgtatatttatgaatctgtttatgaatatatgcacaagaatgtggatacccatgaaggccagatacagttgtgagctacaacatggctgctaggtatcaaattcagatcctctagaagggcagcgcgtgttcttaaccacccagccatttctccagtgcctagggaactctaaaaccaaccaaccaaccaaaaccagttttaattctaagaaactttaaaaatatgcttaagaagttagaattatataatggatctttctctctctctctctctctttgctgagtaagtaccgccaccagcctcccctatccaactgaattattttctaatcaatctaagtcattttgtcatttgtattcatagaatttttgattatttctctaaataatatatatcaacaaaacatgtgtaaattattacagaatttctcataaaataaaatctggcaattccagccagtcggtggtggttgcacacctttaatcccagctctctcaggatacagaggcagtcaaatatctgagtttgaggtcagaatccaaataggattcacaccttatggatgtctgagttatctctggagtccgactccacagcagcggctcttaaagtgtgtcctgtgtggacatggagagacagttcagtgttaaagagcactgtctactctaacagagggtgaaggttcagtttccagcacacacaaagcaactcacaagcatctataactccagtcccaggtgatctgactccctttgctggcaggcaccatgcacacatagggtatgtatacacctatgcaagcaaaacaccatacacataaaatgaatttaaaaaaaaaatgtacctcaactcccagtgcacctgcactacctggaaacctatggaaatgcagacgctcgggcaccactcgaggctcctggaccagaagacctggagtttagggtcctaatgtgcccaaatgtttaagaaagcgctgatttttatattagcctatgtcccaaagactgtgatcatattcacaaatttactaggaggacacaatggagcctggtctaagcactgtatacacatggctggcgtttgttacagacgtgtgttgaggatacagttagatcacaagaaaaaaagacactggcagaattccagaagaatccatgtccagcctccttgtgctctcactgctccaggggagtctcttcttctatatttgcaccaggtcagcagtgtgtacaatgcctctaactgggaatcccatcacactcggctcacaaagctgttgtcaatactggcctttgggggaactttctgtcacataccagaattccagactcccaaaagggaagtagaagccaaactatttcagcatagtctaccaagtgtgtcaaagctacagtctatgggctgcatgcagccaaggatagctatgagtgaggcccaacacaaaattgtaaaatgtactctaaactctaaataccattagttttttgtgtgtgggggggtggtggtgtatatgggtttgttgttgttgttgttgtaactccaatacatccttatttttgagtgtgaatgtcaaggtgacagattgttacagtgtcaaaaggctggacacacttggtgaagtgagccaccctgtctcagttaattgcagaccagtagtgctctgagaaactagttcccagtagccagccttgcaagtgggcctttctaaggatggcagcctgaaggccactgtgctgcgggtttgcacactttccttccacttttgtcctggctatttcatgttgaaggagctgggtttaccgtcttcacagactactgtcccaacacagatgaacaacacgaatgtatgtgttcattgtatttttgtagtctcctttaaggtgttaaagtattatctagtctcctggatattgttggatcgtttggttttgatttggggtggggttttgtggttttgtttttgtttgcatcttcccctacacctcnnnnnnnnnnnnnnnnnnnntgtgtgtgtgtgtgtgtgtgtgtgtgtgtgtggtgtgtgtggtgtgtgtgtgtgtgtgtgtgtgtgtgtgtgtgtgtgtgtgtttgtgtgtatctgtgtacccaccaaggtatgggagtggaggtcagaaaacaacttttagaaattggttttctccttccactgtgtaatactatgatcctagaagcaaactcaagtcgatcagtctgcacgccaaatgcttcctgtgagacaaggtctcactctgtatctgactggcccgaaactagctatacagaccaagcctgcctctccctcaagtgctgggatgaaaggtgtcctgtacccccatctggtgtgttttatctgttgtttgtttcattttgttctgttttgatgcttcatttggattttgtgacatgatctggccttccactcagcctgcagcccaggttaccctcaaacttgaggcagtcatcctgcctcggactccttagtgttggagtcacagtggacaccactgtgcctggtttgtcccttgggtctttatacattagttctagaagcaatcagattctatatctcactgggggttgggaagtgacccggttttatttctttattaacttgattactgacacaaaaagagatttcccttcacttggccctctctgtgcttcagtccccacatgaaagtcaggttaaatgcccgactcgtctccttccatacagagggtaacttgctttacgttattttttaggtattattacaagcacatgttttttgttttttgtttttgtttttgtttttttcagttctgggattgagcctagggcctcaagcatgtcagacaagaactctgaggtacctacagcccaaatggggaaaattgaatatagatacgatatgcttcaatccattactcttattattgtcttgatgctgaaaccgatccctcattagccaggagtcaccccttcagtgtctctgagagcttttgatgtaaccccaggtgtcttttattgctttttttggtttcttgcctgataagacactgcagagaggttgagccttgttgttggtagtggtggtggtgttttgttttgttttgttttgttttgttttgttgagacatgttctctgtgtatagccttggctggctgtcctggaactctctatagaccatgctggcctcagactcagaaatctacctgtctctgcttcccgggttgctgggattaaaggcatgtgccgccaccaccacctggctgagcctatttctttctttctttttttttttttaaagatttatttatttattatatgtaagtacactgtagctgtcttcagacactccagaagagggagtcagatctcgttatggatggttgtgagccaccatgtggttgctgggatttgaactcctgaccttcggaagagcagtcgggtgctcttacccactgagccatctcaccagcccgctgagcctatttcttatttccggtctggtatcatgcattgcctcagtgtgccctgcctcactaggccacactagggaatacagtcagagcagagaggagcatctcccctctgagcgcataccgtgtcagatgctactgagtggataacagagctaagaagtgagcttttgtggcctggctgagtttctctacctgtttttaaggtgaaatgcttcctaaattggttgtcttcatgtttctcgcttaaaattctggaatgctatgcttctaattctctcctgtgtgtctagcttccctaattttatatttgcagttcttgagataaaacctgtgacctctaatgccgttagtgcaatttttgactttgtctaaaaactatgcaatagttataaaataacaacaataatgaaataattactaaaaatattctcttattttattttgagatagcatctcactaggaacctaggttggcctcaaccttactatgtagcccaggaaagccttaaactcacagtccttagcttcctgagtcctgaaatcatatgcatgtaccaccacacagagttaaatatttatcttttttaaattagttattattgtttggtgattctgtacatgtacatatacgtattactcttattgttttttatctgtagctatatcttacatcaaattactaaaaccacataattttaaattaaaaaatagaggctggaaaaatgtttagagacttgggctacttttcctgaggaccaaggttctattcccagcacccacttggtggctcacagctgcctgtgactctatttccatgggatctaatggcctcttctggcttctgggagcagcaagcctgctcttggtgcacagacatacttgcaggtgaaacacccatgcacatagaatgaaatcatttaactttttaaattaaaggtaagggctgagccagacagtggtggtgcagtgcctttaattccagcagtcaggaggcagaggcaggtggatgtctgtgagttcgaggccagcctcttgtctacagagtgagttccaggacagccagggctacacagagaaaccctgtctcaaaaaccaagaaacaaaagcaaacataaataaatagaaaacaatcacataggagccagagagatggcttagcagctaagagcactggccgctggtccagaggacccaggcttgggttccagcgcccaatgtgacagtaacaaccgtccatacctccagttccaggggccctaatgcccgctcctggtctccacaggtgcctggtgcacagacatgcaggcaaagcacccatacacacaaaataaaaacaaatcttttttgttagtataatatatgataatatatgatatataatatacgtactccttcctcctaggttaatggtaggtaacgtctgtatgttctttcccagctctcttctgttcagttaacagtgaagcctgaagattatgtcatagtagtgagcagacccaagcacatctctcgtcttgtttcttttcacagtgcacagatgctgcacagatgctgcacagatgacggcagcatgtggctttattgaagtttgggggaaggggcaggatcgcctagcctaacctcctgcctcggtattatagacaagctaccatgccctgcgctgtggaacattttaatttttgttttgttctggtttggttttgtttttttttcaagacagggtttctctctgtagccctggctgtcctggaactcactctgtagaccaggctggcctcgaactcacagacatccacctgcctctgcctcctgactgctggaattaaaggcactgcaccatcaccacccggcggaactttttgataggaaaactgcattatgtacttgtaatctagatagtcttcatttgcttcaatctagatagtaaaataatattactaggcaaacagaataatatactacacaccagaataaagaagaagtctcctggggctagagagatggttccacagttaagagcaattgctgctcttacggaggacctgagttcagtttgctgcacttaccttgaatggctcacgcctgcctataattccttattcagaggatccagtaccctactctagcctctgcgggtacctgtacacatgggcacgtatgcatcaagactcataaataaacatctaaaaagtttaaagactttacaggaataataagccccagtgggttagaggttgcacaatgtataatagaaacagatcagggctgtatatggtgatgtgcaccagcacttgggaagtagagacaggaaaatcaggaatctgaggccagccttggccacctagtgagttggccttgcaagagactctgagaggggctagaggatgccgtcccatctcttgatcacttatagtctttcctgcagagtggcagggaagcaaggtggggagggtggttgttttctgttgtagcttcaatgccctccatgcctgcacctggttctgaggcttccgggttcttaggccctgggttcagattgtgctgcgtgcccttaactgcttcccgcctgccttcctctccaccccagggcatcgcaggcacagatgtggctaaggaggcgtcagacatcatcctgaccgatgacaacttcaccagcattgtgaaggcagtgatgtggggacggaatgtgtatgacagcatttccaagttcctacagttccagctcactgtcaatgtggtggccgtgattgtggctttcactggagcctgcatcactcaggttgggtggggcttggacagcagagtggctcgaggctgttctcaggggaggggagggggaatagcgtatctactcaggagtcaagacaagggtttcccagtgctgctcagacagatatctctaccaggtttagtctctacctgcttgctgagcatggagatatatacccagcattagtttagctttttttttttttttttttttttttggtcagcaactatgaagcgcgcttatgtggattaactttgtcttttcaaagcaagcttgcaagtcagatgttatgatcccaaattcaaggtctagtgggtagtgggagctaggccaagtcaacagaaggatgtcactggaaagtgatgcaggcttgatttctggaacaagctgaaagacctggttcttcttcttcctaccaggattccccactgaaagcggtgcagatgttgtgggttaacctgattatggacacgtttgcttccctggccctggccacagagccccccaccgagtctctgttgaggcggcgcccctatgggcgaaacaagcctctgatctcccgcactatgatgaagaacatcttgggccatgctgtgtatcagctcctaatcgtcttcctcctcgtctttgctggtgagccacagctggaaaagggaaggcagctattgggtgctagatttagttaggcacagagaatggttgagaagagacaggagcatagtagctggtgaagtacagacatataggcacactagcagctttgccagtgagtgctgcctgtgtggtctcagcacatagacatggtgcacatagctttccatcatgccacaccacaggggaacaaacgggactgatgccagctgacagacaaaaaccagagaagttgagacgagagccaacatttaaaagatcccattgagtggggctggagaaacaagtctgcaattaaaagcacttgttgctcttgcagaggacccaggatcagctctcagcacccacgtggtggttcacaaccatctgtaaatccagccccaggggatctgatgtccccttctgacctccagcagaatgggcatacatgcaggcaaaacactcatacacataaaacaaaacaaaacaaaacaaaaaagaatctacaataatctttaactgttttattttttaaaaaacaaacaagcaaaaaacaaaacgttcaataactgatataactcagaaatggcccagttagagtggtctttgtaatggccataagcggtcaggacggctattctgtctcaacctgaaccctcactgagaccacagtcatcctctaataattgccctgccctaccaggcgacacactgttcgacattgacagtgggaggaaggcacctctcaattcgccacccagccagcactacaccattgttttcaacacgtttgtgctgatgcaactcttcaacgaaatcaacgctcggaagatccacggtgagaagaacgtgtttgcaggcgtctaccgcaacatcattttctgcactgtagttttgggcacattcttctgccaggtaagattctgtctgggcttgggataggggtgctgggagacagagggcaggagcttgggagctaggactctctctaggtgcccaagattaggagagggagttacgaggaccaaggctaagagtaaacaccttgggggtctcagttggctttcctgggtacctcgtttttagaactgagcccactcaggtgctccaaggcaagggagcatgtcccctgcaagtatgacttagagaattctttcatgacctttctaaatgtgcagaagttccatatagtgaccaagagaagagtcactatctcctacctccttcccatgccagcacagatgaaatggcgtgtgtatagtagtgtagtagtgtataggtagtgtaggctcccagtccccaccctggcccttttgttctgagtgagtttctgattggaaatgctgcacgattcacagaggagtgatgggttggtacgtacacagctgctgggataaccctgcctgggctcctggtatgaaaacgaggatcaagagcacagttgcctggtagtgggaagatggggtccttccttcttgtgccagttccgactagtgaacctagttagaggttcactaagatacttgtctacaaaggattatgggaaggccacacaaccgaagaacatcttcttggagctggagacagcaacagttaagagggggccagagtttaaattccagcactcggtatcacttgactcctgatcacctgtaatgctacctccagaggatctgacactctcttctgtcttctgtggtacatggattaggttacagacccacacgttgacacacacatgcctcgcacgcgctcgcacacacacacacacacacacacatgttcctcttctgcatgccttctctctgtcacacactagcctacatcacaggaagcctccaactttctctgttcctgccagaccgtatattaatcgctgtcatgatactcatagccatccatcacatgattcccatttgaagtgttctatgaagattgtatctgtagcccttctccacgtctgcacttctttcctgttccacaagaacattaggacttgtgccccaagagccctgcagggggcgctgtggccctagccaccccggaggtcttggcctccccgtggcaggccgtgctttgctgtgtttcagatcatgattgttgaactgggagggaagcccttcagctgcacaagcctgaccatggagcagtggatgtggtgtctctttatagggattggagaacttttgtggggtcaggtgagtgtggggtgccctctacagatccctaaagctgcagaccccagctccttgtttcacctgacccaaccttcccccttccctccatcacagtttcaagttccttctgtcttggggtgccaggctggagtaaccattgccttcacttcagaacttaggttctctgtcccccattcttagagactgaaaaaaaaaaagcgttttgaaacaaaagtggaaattttccattaaaaaataaacctaaggatctttaaaaaaaaaaaaaggcaaaagcaaaacgcaaaaagcaaacgtcgtgctgacgatgccacagtctgacccagggctactccactgccgtggtgctgctgtagttcagagctttcccgcctcttctctgcttcacggtggctggttgaatgcccagctcccacttgagataaatcagtcctacagatgctccagagaggagggtgacactcggatcagcacagcctctggaagccgctggggctggaatcacccttcttctcttcacaaactttagtagccatgggcaagttccttagccagtccatttattagggatctccacataggataacagagtgatcattacttgttgttaactagtgaacgattattgaaccaaaaacatgacaatacctgttataagtactcagtgagtgttaatactaattgcgacaatgtcatcgtagctttgagtttcatccttcccttaataccatgcttagttctggcctggactgttctccgcagatctcaagtctatactgagaatcccctagtgccgcttcccaagctaaaagcgggattaaggaagggatgaaagtcagcttagctaattgtgttccaattcgtgtctcagtccctccaccccacatgtacaacgcatttctctcccagctcgatttgcccttggccccatcttcctgatgtgtgcctgctttatagctctgttcagttgtcttaaaaaagacaaagatcccactgggaaggaagagtcaagacggagacagagtgtgagtgtaatgaagtggctgggagattacaggaatcaagtccccttctgtgtgtccacaaatgctggcaccttcccaagtgcaatcaactggaacaatgggttcatctcctgggcagcttagtgcttcttggtgcttctcaggtgggaaaggcttgaggcttaggagcctcccaagggcctggctcaggccagctaacatcttttcttctccaatgtggctgttgtcccctttggctgtgactgctctcaggtcatctctgcaatacctaccaagtctctgaagttcctgaaggaggctggccacggcagtgacaaagaggacatcagcagggatactgagggaatggacgagattgaccttgccgagatggagcttcgccgaggccagatcctctgggtccgtggcctgaaccggattcagactcaggtactctgtggtggcctgtccttaccctgggagaagaagtctccccatcctgggaaagggtaggaaggcagtaattcctggcagtcaacacctttacccctttcgtaaggctcactgttcaagcgcagcctgtgttccttaacttcagggccaacagggccagaggtctctgggggattcctctaggagggactagtcggcagactggaccatgggccaacagactggaccacggtccccgagttcctcagctgtggttagcccttcaacccatcgccacccccaccccaggtttgtcagtggagatgtcttcccacataaggtctattccagtaccagccacgaccccaagatagggactgtgtagtcccttccctgccctgatggaagaactaagaggccctgattttataacactggaaggaaagccagcatccctgactggtcgaagtgagagctgttatctggggaggtctttgttaaagaagctcaccttcttccattgttccaccttgatgcaaggcctctctggggcatctgatgattaagtagctataaacagcagtctctctgtgcctgatatctttggaagaattcagactggcttcccaaaaagggaatttctgaaacagagtacaagtgagtcccctgcttgtagccctaaccccatttcccccgacttccatgcatcgctactgggacagcttcggagacccctcaaccttttatggttttagtcccaagattcccaaacaaaccgtcaattccaagatcttgaggggactgtcctgagcaagacctgtttcttccccctagttggcgagagatcaaaatatttcactttcaaaaactggcctttggctggtttagaaaattgcctggccagcctccccctcccccatcccctttagtgtacagggaagacaagctaattcacattttaaactgcttacctggtaggaactgcctcccacccacccccaaccccccaggaagacaccaggtagaaaatgggcaagatacaggtcgtaaaccctgggctcctctcctctttttcctaggaagggaactgaatcctgacttacatatatcacctcatgatagcaagtccccacctctgcccacccccacccccacccccaatgagtcccttgggtgcccgtagaatttagcaccttgacttccatctcttcaggtctgctcctttcaaaataacctctttgcttttcttcccttcagggtcctcttctactgtgtgtttgctttttttttttttttaatatttatttatttattttggttttgtccctgtttttttcctggccaggatcccctccttccagagcctccttgcttcttgccagtcttctttctggggagctgagattcatggctcttccttttcctgcactcccagtttgcatcccctttccgtacctctccgatctccacagcacacataccttcaggcatacctctttccctgctagaatggaagggagctgggccagattgactttaaaacctaaatctgaggccaaccatgtggtgcacatctaacaatcttcaggaggctgaggtgggaagattcctagttaggccagtctgggctgtgtagctagaccctacctcaaaaaaaaaaaaaaaaaaaacaagcaaaagcctaaacagcctccaacagcagcctattgaagatgccgctgataggatccatccacaacattgtaactggcacctaactgagcaaatgagactgagtgtgctaactgcatcttccatgtccaaagccctcccacccccatcaggagggattttgttcagtctcaggaggattccaacaaaagcccttacagtctggctgctggtccccaattgcaacacgtggggtgggagatgttgccaagtgactgcccagtgctggctgggatttcccccttcccctggctctaggcatttcctcccttcacctttaccctttagtttgggggaggaaaaagcactagaaagcaaacatttgaagaattaaagggctggactcttagaacagtaaactcagaatgcagttttcattatgtaagttggaccctgtaacactctaagctcctaggaaggagcctctaccttcttaatgggactgaaatccgccccctaagggcagccctcacctcctacagcctcagccagcaggccactgtgtggggaagcatttttagctcatacttggtctccacccctaagtatttcatggcttctccagaggctctgtttacaagaacaggagtctgactcaggagaaaccttccttctggggatgcagtcacagaatcccaatcgatctctgaaagataaaggaatccctttctatttgctccttattgcttaggagtcaaggagaagggtggtagattgattaagaccccagatcattgcttactgcgggaaagcgatgatattaattgcctccatccctaagaaggagaaagcggaaagccagaaggctgctgtggtaggcgggtgggggagagtggcagcagcggcagcctcccagcgtcgccagcaccagtctgccagtgaaggtctccagtgcttaagtcatgagtgagtttcagaattgtgcgtcatgtaccagcagaatcctaagcaccactgcagctggaggaagcgtcaaaaaagacacctcctccaaaccaagccactcaacctggcagtcttttcaccaaggccacttgtgtggactgctatactgcccatcttctttacacacgtgttaacttcctgggaaatttgcaaaaacaaacaaacaaacaaacaattagttgacttagttggtgtagaggctcttgggtcttacatttcactaatatgtacttagtttctggtatgtcaaattgcatgccttatttttaatagtacaggtcaacataatgaaaaagctacctgttaccattggggagaagttcttttgtgcctgtccatcctaggctacaggggaaaaggaaacccaatcctagctgggtgtttgaaaatccatagcaaattgttccttaaatgacaatgacagtgtggtttgcaattactgccctcccccgccccaccctcacctgttgctctgggtttaagggaatagctctcttgatctcctacccctctccccagccctcctgaccctgccttcctcttccttctctctgactgtggagcaaagctgtctcactctctgattctttgcagattgacgtaattaacaaattccagacggaagcccccttaaagagagtccgagagaacatgactcaacaccttgatgtaaaactggttcctagctcctattccgcagcagttgcatcactcagaacttgcccctccatctcttctgccatctcttctgcagttacatctcctcctgtgggcagtgagtgagagtatgttacaatgcatgatttactaaagcgaccacaagagagcacgtggcatccactttaaccaaccatggttactagtgcttttcgggtcccccacccacccctttgatcttttgacttaagggaagaaaagaaaaaaaaattctaccctaccccagctaaaaccaggctggataccctggtttcattttattgtttttttttttaatgttggaaagttattaaccttaactattttaaagacgataaccctgttttctgattgttcctctgcattgctcgctgcttnnnnnnnnnnnnnnnnnnnnnnnnnnnnnnnnnnnnnnnnnnnnnnnnnnnnnnnnnnnnnnnnnnnnnnnnnnnnnnnnnnnnnnnnnnnnnnnnnnnnnnnnnnnnnnnnnnnnnnnnnnnnnnnnnnnnnnnnnnnnnnnnnnnnnnnnnnnnnnnnnnnnnnnnnnnnnnnnnnnnnnnnnnnnnnnnnnnnnnnnnnnnnnnnnnnnnnnnnnnnnnnnnnnnnnnnnnnnnnnnnnnnnnnnnnnnnnnnnnnnnnnnnnnnnnnnnnnnnnnnnnnnnnnnnnnnnnnnnnnnnnnnnnnnnnnnnnnnnnnnnnnnnnnnnnnnnnnnnnnnnnnnnnnnnnnnnnnnnnnnnnnnnnnnnnnnnnnnnnnnnnnnnnnnnnnnnnnnnnnnnnnnnnnnnnnnnnnnnnnnnnnnnnnnnnnnnnnnnnnnnnnnnnnnnnnnnnnnnnnnnnnnnnnnnnnnnnnnnnnnnnnnnnnnnnnnnnnnnnnnnnnnnnnnnnnnnnnnnnnnnnnnnnnnnnnnnnnnnnnnnnnnnnnnnnnnnnnnnnnnnnnnnnnnnnnnnnnnnnnnnnnnnnnnnnnnnnnnnnnnnnnnnnnnnnnnnnnnnnnnnnnnnnnnnnnnnnnnnnnnnnnnnnnnnnnnnnnnnnnnnnnnnnnnnnnnnnnnnnnnnnnnnnnnnnnnnnnnnnnacacttgctactgccttcctgtttctggtctatttaccttcccagaacgggaggcagaggggagacagtcagcacggtttccagtgagggaatgtcctctgtcatcacacatgttacatacttgagtgtcccatccatcccttcccacaaccagccctgagttgccagtggcctgtgatcacatgactgcccaagcttcaatttgtttttgccttttatccacccataaaagttctggtaagagttttgagttgagggtggggtcaaagtgatacctgctgtttcttgaggcccaaaggcaggcctgaagacactaaaaagtcttaccctgcaaaaacctctccttctagtcctgccacattcctctactaatctcttctctctcttagttctgccctccctttcttttttttttttcgagacagggtttctctgtgtagccctagctgtcctggaactcactttgtagaccaggctggcctagaactcataaatccgcctgcccctgcctcccgagtgctgggattaaaggcgtgcgccaccacgcccagctcttgccctccctttctaagagtcttgctgaattgttcattcacatgtctctggtagaaagagctggctgtcctggggacttaatggcagaggacagagaccagtgggctcagaggaactggtaaaccacataccctgtgcccctaaaagtttagatcaaagaagaaatagaccacacctactttctccggcacgccccttccctggagaccccaggagttgcggttgtgtgtttaaccctctcacctgctttgccatcccagttttaaatgactccgactgtgcatccggatctccccaagttccctgaggcttccctctggaaggaagtcccatagctctctacccctagcctatgaaaggggagtggaaaagtacagtattcccatggggaaatggcaccttcatcagaccagctaagcttccaagtgtgctccacactcacctgctttgggttccctcccggtgaacccctttaatcagcccctcaggaaacatttcctggctaagcaggaagcaggtgatgcttttcccatgtctgctccagcagccctcctcatccccacatactgcttacacaccggattctgtgctccaggcccagatcacagtaagtaatatagtcactgtgtgactggctgtccggcagcacatgatctctgagccagtgttggagttgagcatctggcacaacccccaccactctgtgcctcacccttcccccacccctaggccaggtggtcctccccagtcccctgactccttgcttgggcctccttccaggtggctggttccccttagtgtctagaagtcctgaatctatgtggacaactgttcttgcctcccccaaaggtggccctattttcccaccggaccccccccctttctactttatctcctgtatttgtttgcctataagagggttgttaatcaccccaacaagagagaggacaagcccgcaaacatactccagacccttcaatcctaattttcaaaaatcaactcttttcataatgcacatataattgttgcaataaaatatccagttaaaaacaaacaaataaacaaacaaacaaaaaactagaagcaagaaggtttaaagctataaaggtccctgccatcctgtagaactccgaagaatgtagaaatggcaacatcaggtggcggtattcctatgtactaacctacagactttaatcctgtcccttggccggggcatctctaccagggttaagggagaagactgagtttcagctcacttagtctatcttgtcttgctcaaatatatcaagtataggttacagaaaacttgggaccacccaaagatttgagggagcttccattctgcctgatcttcttacccagatccgaacagaggcaacctgactggtgaaattcaccatcagacggccagtagaaccacggaaggatggaaagcaggccctcgctgctgttcctgaggttacatttcttatgtatgctgcagggttgagcttacagttgagtggcagagtctcttgccttccaagccctgaacactccagtcattgggtgggtctgtagctatagaggagagaggccagggagggaaaggcttagccagagaagagagagctacagctctgatggtgaggcttctgtaggcagtatctttgagggatctgtaaaattatgagaggacccaggacaggaaacccagctggtttatttggctgtttgtgtgcgctgctacctccacgttctcgcttcttccctagggatgtattttttgtttaaacagcagaggaattaaagagacactcttaccacccggcatccactcctcctccctaacaatttctttcgcatcaatcttgtttcttttccaaggaagaatgggtctgaaccagactaggattgaccacttccctcaatagaagacatcctagagccaccagctttccctggcctccacccctccccaacactgcatcccagtctaccaacccagattcaaagccacacttgagtgacacagttcggacatgtagaattagcaaagcaaagcagcaaacaacgaaaacacccaaggagcttatgcttaggattaagcaaaagctgcccccaggattcatcgcagtcagtcttccctagacccctgagccaccaagtcccttcttctatgcagtagaaaggaggctgaccaggcaacatatttgcccatttactcaggaacactgcaaagtgtctccgtcattcttttcaactgtcccagcagaaaagccactcatttgaagccagcctcctggatcaggttcctctcctggtaactctgtatcttcacactaggtcatgttcctcttcacaatatgcaggtggctgggcaaagcagcatgaaggtacactttgggtctgagcaacgttgctgtggattgggcgtgggtgtgcagttgaaggatgaacaccaggccttcctcagtagacagggaaaggcttcttttcatacctgggttttatctgcatcttctagggaaaggagaggcagccctcccttctgtgggggaggggacacagcagaggcggtgggatggaaagggatatgcatggcttctgaattacagttagggacttttaatttccctgcatgctgtggaatgaagattggcttgtctgcctgtgcacagtatccatggtcacttgtcactcagtgtttatcatgtgcagttttcatgaactttggctgttgaggggttgaaacagataacagagctgctgtgtgtaattttctcatcccacatgcacaagaagaggccagcctcaatacagaaagtcacctgtgtgaattgccttttaagttcttccattaatgtcaccttgttccaacatgctgtcctctatccagaagaactaaccaatcagtcccttggtttgtttcattttaagagtggattcttttggaatgctgtttgctttgtgctactttttggaatgtaacctttgagacatcctcaccgactgccatcagtcactccacgccctgtgcttgagatccgaggcgtgtgatggtttgggttgttgagccatcatgttttatagttgggggcgggagttgtttctcttctcaaaccactaattttttttgttgttgttctccatgccaattctcacctctcttctcttctcatcctctttctcattctcctggttatagatcagagtcgtcaaactgttccataataaccatgaagttgctcataaacccaagaatcgtagctccatccacaccttcatgacccaacctgaataccccgcagatgat

SEQ ID NO: 48 - DNA, 3198 bp, Mus musculus
agccatgaaggggagtttggctgcaccttaatggacctgcgaaagctcatggagcttcgtggagctgatgcagtggcccagatcagtgcccactacggaggggtacaggaaatctgcactagactgaaaacctcccctatagaaggtctatctgggaaccctgcagatttggagaagcgtagacttgtttttggaaagaacgtgatacctccaaaaaggcccaagactttcttagaattagtgtgggaagccctgcaggatgtcacgctcatcatcctagagatcgcagccatcatctccctggtcctgtccttctaccgacctccgggtggagataatgaaatctgtggtcacattgcaagtagcccagaagaagaggaggaaggagaaactggctggattgagggggcggccattctcgcctcggtgatcattgtggtactcgtgacagccttcaatgactggagcaaagagaagcagttccgggggctgcagagtcgcatcgaactggagcaaaaattctccattatccggaatggtcagcttatccaactcccagtggctgagattgtggtgggagatattgcccagatcaaatacggtgacctgctgcctgcagatggaattctaatccagggaaatgatctgaagattgacgagagctctctgacaggagaatcagatcatgtcaagaagactctggacaaagaccccatgttgctctcggggactcacgtgatggaaggttctggacggatggtagtgactgctgtgggggtcaactcccagactggaatcatcttcaccctcttaggagctagtgaggaagaagatgatgatgacaagaagaagaaagtcaggggtctaaggaacattccaggaagagacagaagggcatcttgccttccacctgcctgccatccactgctatattcttgcctgctcacttgctctgtccgtgtgtctaccctagcaaagacccaggatggagtggccttggaaatccagccactcaacagccaagaggggctcgacagtgaggacaaggagaagaaaatagccaggatacccaagaaagagaagtcggtgctgcaaggcaaactcacacgcctggctgtgcagatcgggaaggcgggtctgatcatgtctgtcctcacagttgtcatcttgattctgtactttgtggttgacaatttcgtgatccagcgccgagaatggcttcctgagtgcactcctgtctatatccagtattttgtcaagttcttcatcatcggagtcactgtattggtagtggctgtgccagaggggctgccactggctgtcaccatctcactagcctactctgtaaagaaaatgatgaaggacaacaacttggtacggcacttggatgcttgtgagacaatgggcaatgccacagccatttgctccgataagacaggcacactgaccatgaaccgcatgaccgtggtgcaagcttacatcgggggcactcactaccgccagatcccacagcccgacgtcttcccacccaaggttctggagctcatcgtcaatggcatctctatcaactgtgcttacacgtctaagattcagcctccagaaaaggagggaggcctaccccgacaagtaggcaacaagacagagtgtgggctgctgggctttgtcacagacctgaagcaggactaccaagcagttcgcaatgaggtgcctgaggagaagctctttaaggtgtacaccttcaactcagtgcgcaagtccatgagcactgtcatcaggaagccggaagggggcttccgcatgttcagcaagggcgcctctgagataatgctgcgcaggtgtgatcgaatcctgaacaaggaaggagaaatcaaatcgttcagaagtaaggaccgagataatatggtacgcaatgtcattgagcccatggccagtgaagggctccggactatctgcttagcttaccgagattttgatggcacagagccctcgtgggacattgagggtgaaatcctcacttcgctgatctgcattgcagtggtgggcattgaggatcctgtgcgcccggaggtaccagatgcaattgccaaatgcaaacgggctggcattactgtgaggatggtgacaggtgataatgtcaacacagcccgggccattgccaccaaatgtggcattctgactcctaaagatgacttcttgtgcctggaaggcaaagaattcaacagtcttatccgaaatgagaagggtgaggttgaacaagaaaagctggacaagatctggcccaagcttcgggtactggcacgatcttctcccacagacaagcacacattggtgaaaggccctgggttcagattgtgctgcgtgcccttaactgcttcccgcctgccttcctctccaccccagggcatcgcaggcacagatgtggctaaggaggcgtcagacatcatcctgaccgatgacaacttcaccagcattgtgaaggcagtgatgtggggacggaatgtgtatgacagcatttccaagttcctacagttccagctcactgtcaatgtggtggccgtgattgtggctttcactggagcctgcatcactcaggattccccactgaaagcggtgcagatgttgtgggttaacctgattatggacacgtttgcttccctggccctggccacagagccccccaccgagtctctgttgaggcggcgcccctatgggcgaaacaagcctctgatctcccgcactatgatgaagaacatcttgggccatgctgtgtatcagctcctaatcgtcttcctcctcgtctttgctggcgacacactgttcgacattgacagtgggaggaaggcacctctcaattcgccacccagccagcactacaccattgttttcaacacgtttgtgctgatgcaactcttcaacgaaatcaacgctcggaagatccacggtgagaagaacgtgtttgcaggcgtctaccgcaacatcattttctgcactgtagttttgggcacattcttctgccagatcatgattgttgaactgggagggaagcccttcagctgcacaagcctgaccatggagcagtggatgtggtgtctctttatagggattggagaacttttgtggggtcaggtcatctctgcaatacctaccaagtctctgaagttcctgaaggaggctggccacggcagtgacaaagaggac

SEQ ID NO: 49 - protein, 1058 aa, Mus musculus
SHEGEFGCTLMDLRKLMELRGADAVAQISAHYGGVQEICTRLKTSPIEGLSGNPADLEKRRLVFGKNVIPPKRPKTFLELVWEALQDVTLIIIAAIISLVLSFYRPPGGDNEICGHIASSPEEEEEGETGWIEGAAILASVIIVVLVTAFNDWSKEKQFRGLQSRIELEQKFSIIRNGQLIQLPVAEIVVGDIAQIKYGDLLPADGILIQGNDLKIDESSLTGESDHVKKTLDKDPMLLSGTHVMEGSGRMVVTAVGVNSQTGIIFTLLGASEEEDDDDKKKKVRGLRNIPGRDRRASCLPPACHPLKCLLTCSVRVSTLAKTQDGVEIQPLNSQEGLDSEDKEKKIARIPKKEKSVLQGKLTRLAVQIGKAGLIMSVLTVVILILYFVVDNFVIQRREWLPECTPVYIQYFVKFFIIGVTVLVVAVPEGLPLAVTISLAYSVKKMMKDNNLVRHLDACETMGNATAICSDKTGTLTMNRMTVVQAYIGGTHYRQIPQPDVFPPKVLELIVNGISINCAYTSKIQPPEKEGGLPRQVGNKTECGLLGFVTDLKQDYQAVRNEVPEEKLFKVYTFNSVRKSMSTVIRKPEGGFRMFSKGASEIMLRRCDRILNKEGEIKSFRSKDRDNMVRNVIEPMASEGLRTICLAYRDFDGTEPSWDIEGEILTSLICIAVVGIEDPVRPEVPDAIAKCKRAGITVRMVTGDNVNTARAIATKCGILTPKDDFLCLEGKEFNSLIRNEKGEVEQEKLDKIWPKLRVLARSSPTDKHTLVKGPGFRLCCVPLTASRLPSSPPQGIAGTDVAKEASDIILTDDNFTSIVKAVMWGRNVYDSISKFLQFQLTVNVVAVIVAFTGACITQDSPLKAVQMLWVNLIMDTFASLATEPPTESLLRRRPYGRNKPLISRTMMKNILGHAVYQLLIVFLLVFAGDTLFDIDSGRKAPLNSPPSQHYTIVFNTFVLMQLFNEINARKIHGEKNVFAGVYRNIIFCTVVLGTFFCQIMIVELGGKPFSCTSLTMEQWMWCLFIGIGELLWGQVISAIPTKSLKFLKEAGHGSDKED

SEQ ID NO: 50 - DNA, 3216 bp, Mus musculus
atgacgaatccaccaggacaaagcgtgtcagccaacacagtggctgagagccatgaaggggagtttggctgcaccttaatggacctgcgaaagctcatggagcttcgtggagctgatgcagtggcccagatcagtgcccactacggaggggtacaggaaatctgcactagactgaaaacctcccctatagaaggtctatctgggaaccctgcagatttggagaagcgtagacttgtttttggaaagaacgtgatacctccaaaaaggcccaagactttcttagaattagtgtgggaagccctgcaggatgtcacgctcatcatcctagagatcgcagccatcatctccctggtcctgtccttctaccgacctccgggtggagataatgaaatctgtggtcacattgcaagtagcccagaagaagaggaggaaggagaaactggctggattgagggggcggccattctcgcctcggtgatcattgtggtactcgtgacagccttcaatgactggagcaaagagaagcagttccgggggctgcagagtcgcatcgaactggagcaaaaattctccattatccggaatggtcagcttatccaactcccagtggctgagattgtggtgggagatattgcccagatcaaatacggtgacctgctgcctgcagatggaattctaatccagggaaatgatctgaagattgacgagagctctctgacaggagaatcagatcatgtcaagaagactctggacaaagaccccatgttgctctcggggactcacgtgatggaaggttctggacggatggtagtgactgctgtgggggtcaactcccagactggaatcatcttcaccctcttaggagctagtgaggaagaagatgatgatgacaagaagaagaaaggtaaaaaacaaggagcccctgaaaatcgcaacaaagcaaagacccaggatggagtggccttggaaatccagccactcaacagccaagaggggctcgacagtgaggacaaggagaagaaaatagccaggatacccaagaaagagaagtcggtgctgcaaggcaaactcacacgcctggctgtgcagatcgggaaggcgggtctgatcatgtctgtcctcacagttgtcatcttgattctgtactttgtggttgacaatttcgtgatccagcgccgagaatggcttcctgagtgcactcctgtctatatccagtattttgtcaagttcttcatcatcggagtcactgtattggtagtggctgtgccagaggggctgccactggctgtcaccatctcactagcctactctgtaaagaaaatgatgaaggacaacaacttggtacggcacttggatgcttgtgagacaatgggcaatgccacagccatttgctccgataagacaggcacactgaccatgaaccgcatgaccgtggtgcaagcttacatcgggggcactcactaccgccagatcccacagcccgacgtcttcccacccaaggttctggagctcatcgtcaatggcatctctatcaactgtgcttacacgtctaagattcagcctccagaaaaggagggaggcctaccccgacaagtaggcaacaagacagagtgtgggctgctgggctttgtcacagacctgaagcaggactaccaagcagttcgcaatgaggtgcctgaggagaagctctttaaggtgtacaccttcaactcagtgcgcaagtccatgagcactgtcatcaggaagccggaagggggcttccgcatgttcagcaagggcgcctctgagataatgctgcgcaggtgtgatcgaatcctgaacaaggaaggagaaatcaaatcgttcagaagtaaggaccgagataatatggtacgcaatgtcattgagcccatggccagtgaagggctccggactatctgcttagcttaccgagattttgatggcacagagccctcgtgggacattgagggtgaaatcctcacttcgctgatctgcattgcagtggtgggcattgaggatcctgtgcgcccggaggtaccagatgcaattgccaaatgcaaacgggctggcattactgtgaggatggtgacaggtgataatgtcaacacagcccgggccattgccaccaaatgtggcattctgactcctaaagatgacttcttgtgcctggaaggcaaagaattcaacagtcttatccgaaatgagaagggtgaggttgaacaagaaaagctggacaagatctggcccaagcttcgggtactggcacgatcttctcccacagacaagcacacattggtgaaagcttcaatgccctccatgcctgcacctggttctgaggcttccgggttcttaggccctgggttcagattgtgctgcgtgcccttaactgcttcccgcctgccttcctctccaccccagggcatcgcaggcacagatgtggctaaggaggcgtcagacatcatcctgaccgatgacaacttcaccagcattgtgaaggcagtgatgtggggacggaatgtgtatgacagcatttccaagttcctacagttccagctcactgtcaatgtggtggccgtgattgtggctttcactggagcctgcatcactcaggattccccactgaaagcggtgcagatgttgtgggttaacctgattatggacacgtttgcttccctggccctggccacagagccccccaccgagtctctgttgaggcggcgcccctatgggcgaaacaagcctctgatctcccgcactatgatgaagaacatcttgggccatgctgtgtatcagctcctaatcgtcttcctcctcgtctttgctggcgacacactgttcgacattgacagtgggaggaaggcacctctcaattcgccacccagccagcactacaccattgttttcaacacgtttgtgctgatgcaactcttcaacgaaatcaacgctcggaagatccacggtgagaagaacgtgtttgcaggcgtctaccgcaacatcattttctgcactgtagttttgggcacattcttctgccagatcatgattgttgaactgggagggaagcccttcagctgcacaagcctgaccatggagcagtggatgtggtgtctctttatagggattggagaacttttgtggggtcaggtcatctctgcaatacctaccaagtctctgaagttcctgaaggaggctggccacggcagtgacaaagaggac

SEQ ID NO: 51 - protein, 1066 aa, Mus musculus
MTNPPGQSVSANTVAESHEGEFGCTLMDLRKLMELRGADAVAQISAHYGGVQEICTRLKTSPIEGLSGNPADLEKRRLVFGKNVIPPKRPKTFLELVWEALQDVTLIIIAAIISLVLSFYRPPGGDNEICGHIASSPEEEEEGETGWIEGAAILASVIIVVLVTAFNDWSKEKQFRGLQSRIELEQKFSIIRNGQLIQLPVAEIVVGDIAQIKYGDLLPADGILIQGNDLKIDESSLTGESDHVKKTLDKDPMLLSGTHVMEGSGRMVVTAVGVNSQTGIIFTLLGASEEEDDDDKKKKGKKQGAPENRNKAKTQDGVEIQPLNSQEGLDSEDKEKKIARIPKKEKSVLQGKLTRLAVQIGKAGLIMSVLTVVILILYFVVDNFVIQRREWLPECTPVYIQYFVKFFIIGVTVLVVAVPEGLPLAVTISLAYSVKKMMKDNNLVRHLDACETMGNATAICSDKTGTLTMNRMTVVQAYIGGTHYRQIPQPDVFPPKVLELIVNGISINCAYTSKIQPPEKEGGLPRQVGNKTECGLLGFVTDLKQDYQAVRNEVPEEKLFKVYTFNSVRKSMSTVIRKPEGGFRMFSKGASEIMLRRCDRILNKEGEIKSFRSKDRDNMVRNVIEPMASEGLRTICLAYRDFDGTEPSWDIEGEILTSLICIAVVGIEDPVRPEVPDAIAKCKRAGITVRMVTGDNVNTARAIATKCGILTPKDDFLCLEGKEFNSLIRNEKGEVEQEKLDKIWPKLRVLARSSPTDKHTLVKASMPSMPAPGSEASGFLGPGFRLCCVPLTASRLPSSPPQGIAGTDVAKEASDIILTDDNFTSIVKAVMWGRNVYDSISKFLQFQLTVNVVAVIVAFTGACITQDSPLKAVQMLWVNLIMDTFASLATEPPTESLLRRRPYGRNKPLISRTMMKNILGHAVYQLLIVFLLVFAGDTLFDIDSGRKAPLNSPPSQHYTIVFNTFVLMQLFNEINARKIHGEKNVFAGVYRNIIFCTVVLGTFFCQIMIVELGGKPFSCTSLTMEQWMWCLFIGIGELLWGQVISAIPTKSLKFLKEAGHGSDKED

SEQ ID NO: 52 - DNA, 3384 bp, Mus musculus
atgacgaatccaccaggacaaagcgtgtcagccaacacagtggctgagagccatgaaggggagtttggctgcaccttaatggacctgcgaaagctcatggagcttcgtggagctgatgcagtggcccagatcagtgcccactacggaggggtacaggaaatctgcactagactgaaaacctcccctatagaaggtctatctgggaaccctgcagatttggagaagcgtagacttgtttttggaaagaacgtgatacctccaaaaaggcccaagactttcttagaattagtgtgggaagccctgcaggatgtcacgctcatcatcctagagatcgcagccatcatctccctggtcctgtccttctaccgacctccgggtggagataatgaaatctgtggtcacattgcaagtagcccagaagaagaggaggaaggagaaactggctggattgagggggcggccattctcgcctcggtgatcattgtggtactcgtgacagccttcaatgactggagcaaagagaagcagttccgggggctgcagagtcgcatcgaactggagcaaaaattctccattatccggaatggtcagcttatccaactcccagtggctgagattgtggtgggagatattgcccagatcaaatacggtgacctgctgcctgcagatggaattctaatccagggaaatgatctgaagattgacgagagctctctgacaggagaatcagatcatgtcaagaagactctggacaaagaccccatgttgctctcggggactcacgtgatggaaggttctggacggatggtagtgactgctgtgggggtcaactcccagactggaatcatcttcaccctcttaggagctagtgaggaagaagatgatgatgacaagaagaagaaagcaaagacccaggatggagtggccttggaaatccagccactcaacagccaagaggggctcgacagtgaggacaaggagaagaaaatagccaggatacccaagaaagagaagtcggtgctgcaaggcaaactcacacgcctggctgtgcagatcgggaaggcgggtctgatcatgtctgtcctcacagttgtcatcttgattctgtactttgtggttgacaatttcgtgatccagcgccgagaatggcttcctgagtgcactcctgtctatatccagtattttgtcaagttcttcatcatcggagtcactgtattggtagtggctgtgccagaggggctgccactggctgtcaccatctcactagcctactctgtaaagaaaatgatgaaggacaacaacttggtacggcacttggatgcttgtgagacaatgggcaatgccacagccatttgctccgataagacaggcacactgaccatgaaccgcatgaccgtggtgcaagcttacatcgggggcactcactaccgccagatcccacagcccgacgtcttcccacccaaggttctggagctcatcgtcaatggcatctctatcaactgtgcttacacgtctaagattcagcctccagaaaaggagggaggcctaccccgacaagtaggcaacaagacagagtgtgggctgctgggctttgtcacagacctgaagcaggactaccaagcagttcgcaatgaggtgcctgaggagaagctctttaaggtgtacaccttcaactcagtgcgcaagtccatgagcactgtcatcaggaagccggaagggggcttccgcatgttcagcaagggcgcctctgagataatgctgcgcaggtgtgatcgaatcctgaacaaggaaggagaaatcaaatcgttcagaagtaaggaccgagataatatggtacgcaatgtcattgagcccatggccagtgaagggctccggactatctgcttagcttaccgagattttgatggcacagagccctcgtgggacattgagggtgaaatcctcacttcgctgatctgcattgcagtggtgggcattgaggatcctgtgcgcccggaggtaccagatgcaattgccaaatgcaaacgggctggcattactgtgaggatggtgacaggtgataatgtcaacacagcccgggccattgccaccaaatgtggcattctgactcctaaagatgacttcttgtgcctggaaggcaaagaattcaacagtcttatccgaaatgagaagggtgaggttgaacaagaaaagctggacaagatctggcccaagcttcgggtactggcacgatcttctcccacagacaagcacacattggtgaaaggtatcattgacagcactgctggggaacagcggcaggtagtggctgtcaccggtgatggaacaaatgatggacctgctctgaagaaagcagatgtcgggtttgctatgggcatcgcaggcacagatgtggctaaggaggcgtcagacatcatcctgaccgatgacaacttcaccagcattgtgaaggcagtgatgtggggacggaatgtgtatgacagcatttccaagttcctacagttccagctcactgtcaatgtggtggccgtgattgtggctttcactggagcctgcatcactcaggattccccactgaaagcggtgcagatgttgtgggttaacctgattatggacacgtttgcttccctggccctggccacagagccccccaccgagtctctgttgaggcggcgcccctatgggcgaaacaagcctctgatctcccgcactatgatgaagaacatcttgggccatgctgtgtatcagctcctaatcgtcttcctcctcgtctttgctggcgacacactgttcgacattgacagtgggaggaaggcacctctcaattcgccacccagccagcactacaccattgttttcaacacgtttgtgctgatgcaactcttcaacgaaatcaacgctcggaagatccacggtgagaagaacgtgtttgcaggcgtctaccgcaacatcattttctgcactgtagttttgggcacattcttctgccagatcatgattgttgaactgggagggaagcccttcagctgcacaagcctgaccatggagcagtggatgtggtgtctctttatagggattggagaacttttgtggggtcaggtcatctctgcaatacctaccaagtctctgaagttcctgaaggaggctggccacggcagtgacaaagaggacatcagcagggatactgagggaatggacgagattgaccttgccgagatggagcttcgccgaggccagatcctctgggtccgtggcctgaaccggattcagactcagatcagagtcgtcaaactgttccataataaccatgaagttgctcataaacccaagaatcgtagctccatccacaccttcatgacccaacctgaataccccgcagatgat

SEQ ID NO: 53 - protein, 1120 aa, Mus musculus
MTNPPGQSVSANTVAESHEGEFGCTLMDLRKLMELRGADAVAQISAHYGGVQEICTRLKTSPIEGLSGNPADLEKRRLVFGKNVIPPKRPKTFLELVWEALQDVTLIIIAAIISLVLSFYRPPGGDNEICGHIASSPEEEEEGETGWIEGAAILASVIIVVLVTAFNDWSKEKQFRGLQSRIELEQKFSIIRNGQLIQLPVAEIVVGDIAQIKYGDLLPADGILIQGNDLKIDESSLTGESDHVKKTLDKDPMLLSGTHVMEGSGRMVVTAVGVNSQTGIIFTLLGASEEEDDDDKKKKAKTQDGVEIQPLNSQEGLDSEDKEKKIARIPKKEKSVLQGKLTRLAVQIGKAGLIMSVLTVVILILYFVVDNFVIQRREWLPECTPVYIQYFVKFFIIGVTVLVVAVPEGLPLAVTISLAYSVKKMMKDNNLVRHLDACETMGNATAICSDKTGTLTMNRMTVVQAYIGGTHYRQIPQPDVFPPKVLELIVNGISINCAYTSKIQPPEKEGGLPRQVGNKTECGLLGFVTDLKQDYQAVRNEVPEEKLFKVYTFNSVRKSMSTVIRKPEGGFRMFSKGASEIMLRRCDRILNKEGEIKSFRSKDRDNMVRNVIEPMASEGLRTICLAYRDFDGTEPSWDIEGEILTSLICIAVVGIEDPVRPEVPDAIAKCKRAGITVRMVTGDNVNTARAIATKCGILTPKDDFLCLEGKEFNSLIRNEKGEVEQEKLDKIWPKLRVLARSSPTDKHTLVKGIIDSTAGEQRQVVAVTGDGTNDGPALKKADVGFAMGIAGTDVAKEASDIILTDDNFTSIVKAVMWGRNVYDSISKFLQFQLTVNVVAVIVAFTGACITQDSPLKAVQMLWVNLIMDTFASLATEPPTESLLRRRPYGRNKPLISRTMMKNILGHAVYQLLIVFLLVFAGDTLFDIDSGRKAPLNSPPSQHYTIVFNTFVLMQLFNEINARKIHGEKNVFAGVYRNIIFCTVVLGTFFCQIMIVELGGKPFSCTSLTMEQWMWCLFIGIGELLWGQVISAIPTKSLKFLKEAGHGSDKEDISRDTEGMDEIDLAEMELRRGQILWVRQRIQTQIRVVKLFHNNHEVAHKPKNRSSIHTFMTQPEYPADD

SEQ ID NO: 54 - DNA, 57757 bp, Homo sapiens
gcttagactgggtacctcttgcccttgcagatgctggatacttatggctgctctaatggtttctttttgtctatctttgaacctttattccagagatccagttgtcatcggtatccaggaagctctcctcttcctcctcctgacgtctactactacagttgctggttgttgctaaggttgctgccatggtaacatgcacatcctgtttacaccttcatctgggcaagttggtctaagctaggaacctacctaccctggacaactactatcatcaccacctggggacaccaatcatcgtgacacggagtccaccttccactcagttcccccatcctcttcctcctctcgctgccagacttcatacggaagaaaggatctagacttcggacggctactcgggagcttattgcacaagatatattcaatctattccctcactgggcccccagagaagcaagaagtaggaagaagttgagacagggaggcaggagacactggtcagttgaagggaaacgctacatcttctctggttgaggggcttggtaacagcaggcaaaatgacgaacccatcagaccgtgtcttgcctgccaactcgatggccgagagccgtgaaggggactttggctgcacagtaatggaactgaggaagctcatggagctgcgttcgagggatgcactgacccagattaatgtccactatggaggtgtacagaatctctgcagtagactgaaaacctcccctgtggaaggtaaaggccatatcaggggtggggagttggaggaaggtggctagtgtttcaaaatattgttttcccagcttctagagaaggcacatttctggaggcccagctggtatatttttgtctggtgggaaaggtatggcatctgaagcactgaaaggaggggaggccatgaagaaccgtatctttcccagagatgatgtttagaaagtgtgctattctctaaagattattcttttctcctttttcttttctttctttcttcttcttttgtttctttttttttttttttttttttggtgagacagggtcctgctcttttacccaggctggagtgcagtggcgtgatcatggctcactgcagcctcaacctcctgggctgaagcgatcttcctacctcagtctgctgggtagctaggaccacaggcgtgtgccatcacacccagctagctttttagatttttttgtagagttgaggtctcagtatcttgcctagactcatctcaaactcctggacttaagtgattcttccaccttggcctcccaaagtgttgggattacaggcacagtgagccactgctcctgacccctcttttctcctttttctgtatcagtgtccagaaaggaggatatttatttttaaaatgtttatgttataaatgttgttgtcagtaaataatcaagtctgttcttctatatgtctgattataaaataatttaattcttccctacactgatcttacagtttaatgaatggaggaaggaagggtacaaaaaagtgaataagtccagctgcccaattgagcacttctctattgtatactgttagaaatgggatgataggccaagcaggtgggtggctcacatctctaatcccagcattttggcaggctgaggtgagaggatcacttgagcccaggagttccagaccagcctgggtgacataataacaccccatctctatttttttttttttttttttggagacagagtcttgctgtgtcacccaggctggagtgcagtggaatgatcttagctaactgcaacctccgcctcccaggttcaagcaattctcatgcctcagcctcctaggcagttgggactacaggtgtgtgcaccaccacgcccagctaattttttgtattttagtagagatgggatttcaccctgtgggtcaggctggtctcgaactcctgacctcaggtgatctgcctgccttggcctcccaaagtgttgggatgaggaggcttacaggcataagccaccacgcccagcctctattttaaataaaaagaaaaaaaaaaggaaatgggatgctaaatcacaaggtatataactgtacccatcatatctttggatcactcactgttttgtgtcagggaattataagtgattttttttcaactctgctggatacacttttaatgtagttctccttaatcttttttgtttgttttgttttttgtttttttggtttttttgttttgagaaggagtctcactcttgttgcccaggcaggctggagtgcaatggtgcaatcttggctcactgcaacctccacctcctggattcaagcaattatcctgcttcagcctcctgagtagctggggttacaggcatgtggctaattttgtatttttagtagagatggagtttcaccattttgaccacactggtctcaaactcctgacctcaggtgatccgctcacctcaacctcccaaagtgctgggattacaggtatgagccactgcgcccggccttaatctcttcttaaaagctaaaaaaacttaaaagataatgaaaaattcagcttcaggctttggcccagcccagttgcccagtgtgccatggtattatgaaattttgcctcatcaaaatgtagaaagaacaaaaggaaacttgctttttcactttagtctggttttagcatctctgtagcagattcttacttggccctatacatctggcagttcatggttgagtagcatgagatggagcaaagatcttgtccattaggggctttcagtctcatgtggtctcctatttctgaatcttcctcagaggccacagcatatttctcaccaattctaagaagttgttaccctttgccagtgctgtattataagttagtgacttggagcctagactctttaggatgaaaaaagagaaagagagttttacatagatatctatacctagtttatgtcttattttctttacaacctaagggagcttccctacctgttttctttacttctagaatttggtttcctatctcataggctttgagttcaaatgatagctccaccatttactaactaagtagccctctacagtttactcagcctccctgagtctgtttcttctttgaaaataatgttaataacacctagcccatagagttactgagattaaataatacatatacagtgctcatacttataattaggtgttcaatagattagttttctcagattaaaacagagtccatgcatctgtagatacttgccagaacatgggtgcctatggagtgcaatgttttgtcctatctggagaggttactgtgtgtgtaactgcaactactgtccatttcatttgctcacttcttaatcacaaaaaaaaaaaaaaccctgggtaaggtggcaatatctaattgctttcatgtggctcagtctttgccttctaatggtagtccttaatcatacccctttgggctctgtctacttcttgccagctagatttctttattcagtcacttttacagccgtactgactgctgagggtctgttcttaattatatcttcactgagattatgcagtactttacaaacacccatcagaatttaaacaggatctttctttttcccttcctatgctgttcttgatccctctggtcagctgtctgtctcacaaacaggaactcgggagtccaaagaagctggaacctagagaactcctgacagcaggattcaggctttcctccaattttccagatcccttcccagagctgccactgtttactttctgattcccagagagcttcctttcccaaaggccaacatatattctactttctgtcaacattggatatcaaatgttatagacatagctaatgctcttggatcctttcccagtcctggtttcagccccttccaatggcaagtgcttccctcgttacagcccctggccatgcctgtagcctaggactcctaacactggcacaattttctactgccatgtactgcttccttagatcacaaatatgtgtcctggtgtttttctttcttttctttcttttttttttttttttttttttttttagaaggagttttgcttttgttgcccaagctggagtgtaatggagcgatattggctcactacaacctccgcctcctgggttcaagcaattctcctgcttcagactcccaagtagctgggattacaggtgcacgccaccactcccagctagttttttgtatttttagtagagacggggtttcatcatgttggccaggctggtctcgaactcctgacctcaggtgatccacccacctcggcctaccaaagtgctgggattacaggcgtgagccatggcatctggcctttttttttttttttttttctttatgagagatggggtcttgctctgttgcccaggctggtctcaaactcctggactcaagcagttcttctgcctcaccagtttgtattaatgtaagagttaccatagggcttgttctggaactggggagacggtgttggaaaacaacctttccattagtaatttttagtccccagtaccaacagtgacgtcctagtgtgtaagaagaataaagagataagaaaaggagaaaaaaataagaaagaaaaagaaagaaaagaaagaaaagaaaggaagaaagaaagaaaaaaaagaaaagaaaagaagatatagaacagctaagacataggagtatctacccaggcaagggtaatgctcacctgtttagttagggtaggcagacaaaagatccccaatatgctcatcctataaaaagccagcctgttcatggaaggccacacagcctgacagcctaggagaattttgtcattgtgggaggtcccagtggaccaataataagaataaagaaatgtacctggtgcttgaattctgctagctggaaaccaaggtgaaagtgaagatcagagatattgtttcctaaaatataacccttttcctttattttctatggactgatagcatctttagtatagattgacagaatttttttttaaaccatagcttttaagggggcttatggaacttgaagtttattacatttctgatactaacatggttttattatcatagatttacacaattctaaaggcaggtgggacttaattatctcttttggctggccgcagtagctcatgcatgtagtcccagcactatctgtgctttagctaagatactctgtgagactgctctagcataagaagcatttagagcattaatggagtataagtcagaaggcatgaaatattccatcccattctacctggtggtaagaacttaggtcatttaaaccctttagcctggagagagggagagagaaagagattattattattattattattattattattattattattattattattttgggatggattctcactctgtcacccaggctggagtgcagtggcatgatctcggctcactgcaacctccgcctcccaggctcaactgatcctcctgcctcagccttccaagtagctgggaccacagatgcgcgccaccatgccgggttaatttttgtattttttggtggagatggggttttgccacctctacctcagcctcccgaagtgctgggattacaggcatgagccgccactgacccaatgtttttttgttgttgttttcaattttatttttgaaacagggtcttgctctgtcaccgaggctggagtgcagtggtgaaatcatggctcactgcaacctccacttaccaggctcaagcagtcctcccaccttagcctcctggttaactgggactacaggtgtgcaccaccacgcccagctaatttttgtattttttttttgtagagacagggtctctccatgttgcccagggtggtcctgaactcctggcctcaagcgatctgcccaccttggccccccaaagtgctaggattacaggcatgagccctcatgcgcagcctcagcccaatgttttgatagtggcttgtgttccttgagtatacattagctagttagagtaagaggagttgccccagtggccaagagttggttagacttaagaaggcttggagatgtttagctacatggccttcagcaacaaccagaaataaggctgagagcatgagccaaaaagagaagaaaatttagggcaacaagaaagggtgggggagacataaaagagaatacatgtttacatcaaagtaactaaagatttcagtctttatgtctgtatataaacaaaagcaaagatgcaggggtgagactggagctcctgggcaagctgtgttgccttgggtttatcaggagggacaatctgagcattttgcacaatggaatccttcttgtttgcttgcttcgttccccattccagttttttccccctccttttattgtctcttctttccctgtcccattcccacctcaaccaatctttccaatccccaaagaacagagcagtttggttggtataggctagaagatagccttttaccttctgtgtggtttcctgtggagtctcatggcctcgtgagtggaagaagctttttgtgaatctgggatgaaaattacctgtggcttaaggggaagaaggaagaggtattttccttagtctcaatacccttttgtgtgaaggaaaaagggatggtcctggcggcctaggtagaggttatacgtgttcttttttccctgtagaattttgcacgttggtccttagctatgctatcctttttaggaggaagaatggtgttttctgaggaagagttaggccagcccttggaggcaaggtctgggcccagaacagaatgggaaacaaggggagccttgaataaacagcaaattattaactgtaggccttctttcaaaaggctgaaggctattttggttgaatttggatctaaaagattgttggtggaactttctgttttatgttccttctgtacccttctacttcttttctcctctgcagagttgaaggcgtgacagtgagatattgagggcctccaattctttttcaacaacattcaactaatacttaaaaactgctaggtgctagggacacaagggtgaacatgacaggtgcagtgcctccttccatagagcttacaggctaaaagaagatgcatatgaatgaaggcaatttcagaaatcttgccatagggcttcgatgaggaagagcagcgtctatgggaacacagtgtagggacctaagctgaaggcattgcaggggaggggaagggggcttagagctggagacagcacacctgtatcatttagggattacccagtgaagctctagcatggccacgctctatgatcattgctaccacctgctgaatattcctggcataagatgccagcatttttgccttccttaattactgggtagttactaggtttagggagctgagattccttggggagtaagtggcaggcgggaaaaaaaatgtgttttaagacggccaacccaaattacaattttgttttattagcttgaggatttagatgaacgtctatcaccttaagatctctggggcttaactgtgttcccgtcactgtgccttttgagggcagtggcatgttttaccaggaattgtccattttgctacaagctgagatgtactgggattgggctcttcctcggtgtagcagattgaaatttctagtagtattgtcaatctggaaaaaattgagtacatatcccaagtaaatgttcacctacaagactattgccttactattaatacatctaacacttttatttacataataagataggcaaacatatattttcctcactctaacagatggatgcatgccccccgcttagagaccgctgctctaaagcacggtggcgttagggggatgtggaggactaggtgagtgaagatgggatggaacagatgtgagaggaagatgggcaactgggttctttgagatttttcttccctatctttagagcttatagtctgttctggaatatcaatttttaggagctcctccacttgaggttagaagcataacctctattttcctctttctttgtgccctctgccctgtagccatcatctcttgccccaactctactaaggatggcaaataagtgaccctaataacagtgatctgggcatggcctcagagattaacattctgtggtccactctgcctaccaaattttgggcagatggattagcactaactaattcacgatgtgagaaggactcaagccaaaagtgtcctccctctgcccctccccatcccccaccacagggaactccactttgcatcctaggaattccctgtctggtttgagtttcatgcctagggctgaattaggcttcttgtaggctgtgggttctctcttcctagcccagcccaggctctgccagttcttttctacttagccctccttgcctagagctgggcttctgggttcactgtcataatgctgtccagctggggtcagagggatcttcacgaggagagtagctaaggcttccccaacctggaagcaggaggcttccccttcctgctttctctcctggagccctttatgctccattcctttgacaactcagcagcaactgttgcaagttttttgggggtctgatttggtttttaaccttctcattcttggcttacattggaccattagctgttgggaagaaaaatagcattccctccttgggtgaagcagatactgcatctaccgaaagtggggctttcattcttattatttagctccaaggtgggaatatgacaccagatggaagcacattcatgaagtacagaaggtggcagagtggcagagcagaaagctaactagagagctctagggagacttttttccctgggccacagttgctgttttcaaaaaaaggccaagagcagggggcgggataaagggaagcatgccctgaggaagcggcccaccttgggaagggttttgctgaccagaatgagaaaagaagcattgttctccaagttcatcatcctctggctgtgaccttgaatcaactgctttatctctaggagctggaagtctagcagatagggagcaaatctccaagccatgcgtgtattaaactggaggtgctgaagcagggaaactgctgtatactcggaagagtagcattcggttattagccagagatggctagatcttgcatggccctattttgattttaagttactcctccccctcagtccccaaatccagggttgttggggttttttaaaattaattttaactttttttttttgagatggagtctggctctgttgcccaggctggagtgcagtggcgcaatctcagctcactgcaagctccgcctcccgtgttcacaccattctcctgcctcagcctcccgagtagctgggactacaggcgcccgccaccacacccagctaatttttgtatttttagtagagacggggtttcactgtgttagccaggatggtctcgatctcctgacctcatgatccgcccgcctcggcctcccaaagtgctgggattgcaggcgtgagccaccacacccggccttttttttctttttttgagacagggtcttgctctgttgcccaggctggaatgtagtggcaaaatcacggcttactgtagcctcaacctcctgggctgaggccatcctcctgcctcaacctcctgagtagctgggaccacaggcacacgccatcatgtccagctaattttttttattatttgtagagacagaatctttccgtattgccccggctggtctcgaactcctgagctcaagctatcctcccaccttggcctcccaaaattctgggattacaggcatgagccaccaaacaaaacccaaatccttttaaggaaggacttaaaaggtattctgctgtctgtccttctcaagttccaaaagaggacagccttcaaatcaacccagagaaaattctccctggtactatatgagtgggagaagattctgctgcctcctttggcaaggtgtcataactcagacagctgggaagtccctcctgatgtctaccctagccccaccctttctggggctgagctggttctgataagtagtgcctctgccgatgtcgttggcccttccctgctggagctaagccactgagggttgggctgcatttctcctcccaggccctaggtcctgcacactcatggcagacacaaatattccactgctgtttattctatgttcccacccagcctgggcaggggccgtgcacctccccagcatggggtgggggtgatgacttcacagctaaacattctctttgcctctcccagctcatgtgttcagtctggttcatagggccagaagtactcccactctgggtggggctttctctctcatgttcttgaggacaagatttcccctcagtttcctgaggaatttctaggggaaacccttttcctgtgtttccagcattctctccctgccaagttttccttcccctctccaggaggttgtgtgagcatctgagaaaccactgcagagatcagggccttttagagccttttcccaggctggacaagtatttgtgtgaaattacagctgctgagatcagggcctgaaagactctctagggcagaaagaattggaatggaaagcccaaaactggggattggccgagctcccagtcccacatggctttcccatgcctcaccacatgtcagagaggattcccaaggctactacagctaagagccttgacctgccccgccttgctgcagggcatactgggaactgagacagccacttgacttcttaaggttgctattgtacaagctcagggtgacttaaggtggaacacatagatgagtagaaaatggcaaaaaaaagaagcaagcaagtgactttgagagcatttaggtaagaacaagccctgactttttatgttttccatagtgtatgtcacttcatttgcttgggtccaaaaaaggccataagaaaggttttattgagtacaaaattcataggtttggactctgatgaacctgatggcgatgttaccatccctgaggccaggaagaaaaaagacaggactaatccaccccaattgtagacagtgggaacagcgctggcttgcttagaggtacagaggaaagcagcatgcaaccctgccccgtggtgaaggaagtagggtggccaaccatcccggtttgcccgggactgagcggggttcccaggaggcagaaacttcagtgctaaaacctggcaagtcctaggcaaaccaggacaagttagtcacactagattgaagcctcagctgagtgcagctgcctccatgtcccagcgtcctctgtatctaggttggcatccagtggccctctgtggggtggcatagactctgccacttaataagctcaagtagtcatacccctgccaggccttagtttgcttctatgtcaaattgggttaatagtagctaccaggtaggggtttgtgatgcttgaatgagaaggcatgaatgtgcctggtgaggcatctggcacatagtaatcacttaaatgttagcaatcttagttatcactcattcattcagttcattctacaaatttgtgtgtgtacaatgtgctgggcaatgctgtaggcctgaggaacaaagataaaaatcctgcccttgtggaggaggtggacaaacaataaatgaatgtgtcctattatatgctaggtgagaagacctgtggagggaaatgattgagcaggatgagggggatcaagagtgccaggtaaatacagtggtcagggtaggcctcactaaaaagaagatgtttgtacaaagacctgagggaggtgaggaagtgagccctctccaacaaagaggaatctgggcagagggaacagcttgtgcagaggccctgatgtagatgcctgtctagtgcgtttagagaacagcaggcaggctggttgggccagatctcagtgaacatggagaaactagtaggagataaggactggggggctgggggagtcataagggtcctggaagcccatcattaagtccttggtgcctagttttactctaagtaaaagccagagggttttgagcagatgaatcgcatgtactgccttggatcttaaaaaagatcattctggctaatacattgagaagagactaagaacaggagagggagggtggaggcaaggagaccagttagaagatgattgctataatccagatgagagaggatggtttagaccaggatgataacagtgaaaatggaaagtgattggactttagatatattttgaagctgataggatttctcaactacatgatataggagatgggggctgggcatcaaagatgattacagggtattagcatgagagcagagagggacaggtagccctgttctctgcccctcatatgtccctctttttgggagggagggtttcattaggctattggggtgcaccttatgatctttaatatctgatgtcttggtttgccctcataatcatctactaaaccttggtaagaaggaaagggcatctactccctttacattgtgaatcctgcttttttgagaagcgtcccaggtagcttaacaaattaccagcactcctgccagcaagcctggctctccagcacagcagacccaacttggcacagccttgccatctctggtccctggggagaaaggaccagcaaggccctgcccctttggcaagtctgcctctgcctgtctggggctaaagattccctgcccagaacactcctttcccaggctctggctttccctcctactgggaacctgacttctcaggctggtggggcagggagtctctggggagcaacccaatttgcttctagaggtttggccaaacctcacagctctgcggggctcagctgtgcccctaagctggaggccagggtgatgtgcttgggcactgggagtcaggagaccctggataagccatcaggcaccacttccctaaccagcccctgtgtctctctcctaagcactagcaagtgaatgtggtctcaaaagagggccctcacacccctaactgcataggtgtggatgctagttcatcccctgcccccccactttcatctcccaccccccacatctaccttcccagacagatgagtatcttatgtatgtctcctgatgctttttgttttataggatagggaaatggaggccatcccaaactctgcaaataatgctcccttgggtacctattttcccattttcaaaatctttatctgttcagatgtcttcctcaggtcctaacccaaatctctccttttgacacttaaggtaacactcctgggttcttttttgagacagagtctctctctcgcccaggctggagtgcagttgcatgatctcagctcactgcaacctctgcctcccagattgcaattctcttgcctcagcctccctagtagctgggattacaggcatgcgccaccacacccagctaatttttttgtatttttagtagagatgaggtttcaccgtgttggccaggctggtttcaaactcctgacctcaagtgatacacccaccttggcctcccaaagtgctgggattacaggcatgagccaccacgcccggcccactcttgggttctattcagtgaagattttcagtgaagagtagacatttgcctgtataccacgtctgcattccttcctcagcaacagaatagcccttcacattgactaaagtgtaaagaaggcctctggcatccaagtcctttgcctccgttttgtccctgcagcctccatcatccacttcttgttctctctgtgaagctcagttgaagttcccttcctctgattctgaccctcctcagctgctaaccttttttcaagacaaaagtcaccctaccctgcctctgggaaacccttcaaaccggcaaccaacagcttccagtgccaaaaccaggactaatttgcctcagcgtgtaaacaacttgaacaccaactggcattaatcaccatggtaggattgcccctcttcccttcaagggtagccccacctggggacccatgaaaggacccaaatataaggaaagcactgagaataattctgcctatctcttgtccctctgggaaagtgcgtagagagtaggtgtggtatgtatgtggtgcatgttctgtgtgtgtgtgtgtcatatatctgtgtggtatgtattgtgtatgtggtttgtgtttggtgtgtatgtgtctgtatattgtgtataaggtgtgtgatgtgagtggtgtatgtggtttgtggtgtgtatgtgtctgtatagtgtgtgtggcatgtggtgtgtgtacacacaggtatgtaagcaaacgtatgttggtagggaggatgctgctaatcaagtactgcgtggcatctgaaaactttgtggccccacctttcttgttctctttttattcaatctgagtagtagtacttcccttagtacctacttagtccttagtagaatggtagtatctctcagtggtgtgtgtttgtgcctctgtgagtgtgtgtacatgcatacacctaggcacacaggtgtgtatatgtgtgtgacagaagaggggcacatgtgcttaaagggaatgcccacaagttatagtcttaaagactctgccctgatgctcccctaaagctcctggatcttagaattaggacacatgtgtgggctctgcctccatcttgcatgaccttgagcaaggagcttgttcttcctggcctttgtgtgtgagccaatggatggcagctcactctgcttttaaatcactgcagcatttacctgttaatatgacataaaagttctatgtgaatcccaagaaccactttaatatttaatgttctcagagctggagcctggggcatactcaatcagtagcagataagattttatgtctggttaagaatttatccagcttatacttgttactaagataagtgagtggtcccatggctgactagtttcattttgcccatttttagactgaaagttccaccctctctaagtcctgggcagattaggatggttgtctctaactggatctcatacttgagcaaatcaggaaggaaagggtcttttttatttattttattttagagacaaggtctcattttgttgcccaggctggagtgcaatgacgtgatcactgctgctcactgcagcctcaaactcctgaggtcaaaacaatcttcccacttcggcttcctgagtagctgtgactacaggtgcaccacatcatgcctggctaatttttgtcttttttgtggagacaaggtttcaccatgttgcccaggctggtctcgaactcctaaacataagcaattcacccaccttggcctcccaaagtgctaggattacagacgtgagataccatgcctggcctctttattttatttatttttgagacagcgtctctctctgttgcccaggctagagtgtaatgacatgatcatggctcactgccacttcaaaactgccttttatcattttccttttttcctacattcattcatccactcctatctccttttcaggtctgtctgggaaccctgcagatctggagaaacgtaggcaggtgtttggacacaacgtgatcccccccaaaaagcccaagactttcttagaattagtgtgggaagctcttcaagatgtcacgcttatcatcctggagattgcagccatcatctccctggtcctgtccttttatcgccctgctggtgaagaaaatgaacgtgagtgtcctaaacagctcagcgtgactcttatctgggttctttccaccaccaccaccaagcgcttagtattggtggctgacaggttatagcttaaaacatttcccccattatccagagtgggctttccaaaggaaaccaagcagtagctactaagctattcttccaactcatccttattccaagggttcctccccaccccaccctcaccctctgtcttctattaaatcctttttcggaatgtcaggaatcctctacccttttaagacattttatttatttattaattattattattattattattttaatggaatcttgctctgtcacccaggctgggtgcagcagcttaatctgggctcactgcaacctcctgggttcaagcaattctcgtgcctcggcctcctgagtagctgggattacaggcgtgtgccatcacgcctggctaatttttgtatttttagtagagacagggccttaccatgttggccagactggtatcaaactcctgacctcaggtgatccacccgccttggcctcctaaagtgctgggattacaggcgtgacccacttgcctggcctatttaataatttttacaacatagagacaaggtctcactatgttgcccaggttggtctcaaacccctggggtcaagcgatctgcctgccttggcctcccagagtgctgggattgcaggtgtgaaccaacacccccagccaggaattctctacccttatccaaccaacaaaaccctacatctcaaagtgccccctgccaccaattgtctggcatgatgggaaacagtagtgaaagcctgaccatgttgggaaccataagtgtgaccttacatgtgacttccctaaatttgatagtttgtactatttagtcatttgcctcttttggattaacataaatagttacactagtgataagacaatactcaatcctgctatcctctgatatcctcttccagccaacagttgtatttgctattattcacttttcctgactttctatcttggggtgattgtggaagcactactcctatttcttaatgtcaacaaaagcccttcagtgactatttctctcccttcctgggatagtgtgtggtcaagtcgcaactaccccagaagatgaaaatgaggcacaagctggctggattgagggggcagccatccttttctcagtgatcatcgtggtgttagtgactgcctttaatgattggagcaaagagaagcaattccgggggctgcagtgccgcattgaacaggagcaaaagttctccatcatccgaaacggtcaactcatccagctccctgtggctgagattgtggttggtgatattgcccaagtcaaatacggtgagagctccgtgtttcttttgcttaccccaccaccacccccatttaagggataggtcctttggcatgagggggctgggaattgctgaaaacccaaaaagataagatccaaaattgtattcacttctaggttagagtttaaagaggttgtgggaagccatttcagaaaggagtagctgaaactctgtcgcaagattgtcagacttgtaccctgtgtgtcttagggttaaaagtgtataacattcaggccatggaaaggtgttggggatgaataagagtttgaatttataatgcctggaaagcaaccttctcccagattgtacagagctgaagacttgtaaagagtctccatgtactctcggccattgctgtctagatagggcccatgggaacagccatgagatagggttgaaggagttggaggaccctaccctcagccagtctcttactatctccttcactgtccctccttcccctttgtgctctaggtgatctgctgcctgcagatggaatcctgatccaagggaatgatctgaagattgatgagagctctctgacaggggaatctgaccatgtcaagaagtccctggacaaagaccccatgttgctctcaggtataggccctggctgcccaagttcccatttacctccctgcaaacacctaggccacaggatccagaccctgttctctcctctgactctgtcccatctccttccctggggttcagctggggcaacagcattttggtgggtggaatacaaggatatcaggcagcctaaatgaagttttccatgaaacaagtgttataagggccttgaaggggctttgctggttgcaggggtggcgggggcaggagggagggcttaccctaaagcggttagacacattttcctccttactcccaatttgtctggtctgttttaaatgcgcccagctcttgaccttttcctactgtgctaagcacatcattatccatggggtagggaggagtattttttcttctaagtttgtgtttcataccaaatcatgtctaggtattaaaaaacccattccttcccatcttctcctttcccgtgtagggacccatgtcatggaaggttctggccggatggtggtgacagctgttggtgtcaactctcagactggaatcatccttactctcttgggggtcaatgaggatgacgaaggggagaaaaagaagaaaggtaaggggcatctggaatgagattctctttcctctcatccccatggacaaacaaggaagcgagggagcagatctggatagaaagcatggttggaagaatctgctgccatgaagaaagcagatatccaaactccttgctgagataaagatgtaaatccttggctccagggagctctgatgaaaaccagatcctggctctaggctcccaaatcaggttgaatttgagccttgatttttatgtctaatggtagcttgtaaagggatgagttataaagcctgccctaaataaactggctaggtgctggtagccccaaatgccttccgtgtactccccctccttccccaactttcttcctcaaagatggggggttaaacgaaccatcaagactaagagaaaattggccagaagagtaaaatagatttctgccgaaactgtaggctctcaatggaagagacacacagctagaagagtaggaacagttagttcagtctttgccactcagttattcctgaaggaaagaataagagggagaaagaggagaagatactaaaaccaagtctacacgtttccctaagcattccttcttcccttaggggagagaaggtttctaccacttggctggagaatcatcttgagctgtttagtggaggacagtttatgaaaaggaaacaaaacacattctctcaggaactaaataattcatttctgcagctgcctgcagatgaataagggggaagcttgcctggtgctgttgaagtaacacggagacacctttcaaagtctttgccatcaggcagaaacggttcaaacctctcacttcctaatccccaccccatttttccaagcaatgtgactcaggccaggagcaagagaaagcacctcaggtatgagtatgcactcacctacatgagcgttttggtggatatcccgaggattcatgacagcctctagcaagaatgaatgaaaacagagatgtgagcttcctttacatttatgtcccttccctgcaacccaaacactttgctgttgtccttctgggctctgagcaggaccaacaaattggatctcttaatagttactttgggtttcgaccccacttttttctttcttgttcaaacaggtaaaaaacaaggagtccctgaaaatcgcaacaaaggtaacctctccaactactcatttaccatctctacctgcccacactcaaaccagacctttccaggccatcttccttctcccttttcctctccataaatctgttatctgctgctgtggctcagatgcctcatcctgaggaaggtgcagagatttttggggtggtctcaaggtcctgatcccaatctaagatgggacaacagcaccctctgctgttggctcacagaatgtcatgtcaaggtttgtcttggggagtgtgtaggattgatctgctcttcctagggagctgaactctgcttcattgacctcagcctgatttaaacaccaacagtcatcagtttctgggttggaagacttcagggtcctcatggtggagggaggtggggtgggtagtccctgcaccgtcctcttgctagcttcctcataagtgtcctcttctggtctggatcccttctctgctggtcttctcaggggtgcttggagagagccctttctctgtatctctctccccacctcccttctttgttcttgccacagtctgttttcttcctcctgatctgatgtgtgtgtctcttttggtgactgtgttcacattctgtctccgtcttcttgtttgtgagtctgacagcagggactactcaggaagggtatcctaagcaaggggctgagccctatagcagtgaaagtggagtggtgctgggagccagcaagaactactgtcttgtgacgctcctagagatttgtttttactttgtaacccacatcacagcagtctttagaaataaagtcatcacattggaaaaccagagctaaacagaaataattctttaattttaggtctttaactcttcttttaaaagcaaaatggatttatatgtctctctttatccctgctttctcttattccaggaggtccctcacaccagcttcttccctcttccccaaaagacttaaccccaggtcccactctgtatctctctacctttgtcaggcagggaagaaagggaattttcttttcctatcctcaactgctagaaggggctggaaaataccctgggtctgggggtatgtgtttcttccctgacaatcgagagagagagagagagagagagagagagagagataaaccatttaacagagcaatcttgtgctccagaaacatctgccaaccctctccttcagcccctttctgcagtaaagattcactattttaagcactgagttccaggaaggatggttgttttaatagtgcttagtgacatgattaatccccttgctggaataaacctagcttgggactctgaggtagtaccaggaagctgccactgaagaagaaatccataccctaaaagcaccccagtttcatctaaactcattagaatattattccaaaggccctaatagagtgttgaaggcaagttccatgtctagcatgggttggaagtggtcggaactgatgtcagggtccaaggtatattccgggaaagagacaggaaggttttctggtttccacctgcctgccactcagtgctaccaccttgcctgctcacctgtcctatttgtgtgtacactccagcaaagacccaagacggagtggccctggaaatccagccactcaacagccaggagggaatcgacaatgaggaaaaggacaagaaggcagtcaaggtgcctaaaaaggagaagtcagtgctgcagggcaagctgactcgcctggctgttcagattgggaaagccggtgagtagggtagagcctcgttgtggtttatcaatgttgtcttggatcctcatcacttttatccccttctttctgcaccgaccgagactggcagaaagaagctgaaacttcagggtggctagttggggctaggcggctgtttccctatctccgccactgtttggtcgctccctaggctttttcagagagaaatgttttcctgtgtgtaagggttaatggccctgagatctcttaatccaaatgaatgagaaacaaagagcatatattacagcaggggagatttacattagcaagaaggaagactttaataactgcttacctgtctcttgctttgggttgtaaattccttaaagatagagaaggctgcagcttgctacaggcaattctctagcataggagtaggatctggctaagcacagagcaataaataccaagtaaggactggaggaagaaggaaggctgtggttacagaggctctctccagaagagaggtaactaaataatgcactctgcatatgaggaagtggcttctccatcacttgcctctacattttcctgtctcaccaccttctttcaatggagggggagaaaggggagtgggaagaagaaatagaagattgctactttagtggacatatctctcaaggaacagtctttttttttttttttttttttttttttttttgagatggcgtcttcctctgttgcccaggatggagtgcagtggcaccatctcagctcactgcagactctacctcctgggttcaagcgactttcctgcctcagccacccaagtagcagggactacaggtgcacaccaccaagcccatctaattcttgtatttttagtagagatggggtttcaccatgttggccaggctggtctcgaactcctggtctcaagtgatccgcccacctcggcctctcaaagtgctaggatacaggcataagccaccgcaccctgccagagagtagttttttaccactgtttattctctgattccacctttctgtttaccacaatcataatcagcacatctctgcactttatacagctgtatacaacttacctcgggttcttgttaaagtgtagattcagttcagggggtctggtgtggagcccgagattctgcattcctaataagcccccacaggatgccagcaccgctgattcagtttgcacacattggatggcagggatctatgctgcccaccatagcagccactcaccacatgtggctgctgcaatttaaattaattaaaagtaaataaagttaaaaatccagttgctggggtaaattttagttggtcacgagccacatgtgctagtagtggctgtcatattggacagcataaatagagaacttcttaagcgtcacagaaagatctattggactgagttggcctaacctcttcatgtccattctggtacccagctaattttaactactgtgaaatctcttgcatataaactatacatggatgagatgaattgcaggtgcagaatcaaacacacaggtttgaaacattaaatctaccccacctaacccttgtactattctcctaatccttgccttgttgttgttgttgtttgtttgtttttgagacaaagtctcactctgtcacccaagctggagtgcagtgatgcaatcttggctcactgcaacctccacctccggggttcaagtgagtctcccgagtagctgggattacagatgtgcatcaccatgcctggctaatttttagtaaagacagatttttgccattttgggcaggctagtctcaaactcctatcctcaagtgatctgcccctggactcaaggaatcccatggcctcaagtgatctgccggcctcagcctcccaaagtgctgggattataggcgtgagccactgtacctgtcccctgccttgttcttcttacagagtacaagctacctgatggctggccactagtctcctctgttgctttattttatatattaggccagtccaggaatagggtgaggcaagtcagatgctttccaccacctggagagtgagttccttaaattttgcactctcagtggcttgcttctccacctgagtcctggccctaatcaagcaaagaacggaagaatttgctttcattgatatcatcatctctagccttgcttggaggcccccgaatcatcaggcccttgggaaaagcaaaaaccaaaaccagataatgatttaaagcagagcttttcccaaatattgtgccacagttagggacagttgtccccagatattgattccatcagccctcaaagcatccaggcagcacccatggcaatcagaacccctaagccagtcggttttgaccttgagcagattctttcacgtactgtaatgtgtagggtaaccaaccatcccagtttgcttgggattttctcaattttagcaaagccccacatccctggaaactgttcagtagtctcaggatggtttggttactctaccaatgggccataccaaagacttcccagtactttcatttcctcatctttaaaaaggcggtaataataatgacctatttcacagggttgtgaagtgcttgcctggcccacagcaggtgcccacataagtatttactattattggcatcttctatgtgtgccgtgacaagagaaatcttgggaagcactgttctaagagttagtcatgcaggtgatacactagcaccatagaggcattgttgtaaacaaggtgtgaattgtccaacattcagaggttagtagaggagaagtcaaaattgataaactactatgaaatggacaagtacagtcatgacattatgaatcgcagggagagggtgggcgtggaataggatcatagaaagctgtttcaggaaacagatcaaccccctgatttatgaatgaggaatttgatctaggaaacaggcccagagagggtcaatgacttgtccaaagccacaagtcaagttagtgcagtgctgagaatagaacctgtgtctttgaaatacgaaaccactgtctgttccctatgctataatgtacaagcaacagagaatgggggggattttagtaagtcttcctggcgatggtggttttaataattggcaacaaaggctacaactgatgccaatctatctctggctagggccctaggactgccctccagcctgggttcatatgacttgtttctctggacaggtctgctcatgtctgctctcacggttttcatcctgattctatactttgtgattgacaactttgtgataaatcgcagaccatggctccctgagtgtactcccatctacatccagtactttgtcaagttcttcatcatcggcatcactgtactggtggtggctgtgccagaggggctgcctctggctgtcaccatctcactggcctactctgtgaaggtgagactagaacaatcctatctcttcctttaggatagagatgggagagaagggtaccatgtaacctttagtgaaaagataagccattctatcatctataaactttggctggtgcctcacaagagcagaagtccctggtattatggaaggaccatctctgtcagatgcatcaatgttgaaatgacccagcagaatcttaagagaatgacaaaaatggtatcttggatttttttttttttttaagacagagtctcattctgtcacccaggctggaatgcaatgatgcaacctccgcctcccgggttcaagtgattctcgtgcctcagcctcccaagtagctgggattacaggtgtgcaccaccatgcccagttactttttgtatcttttacagagacagggtttcaccatgttggccaggctggtcttgaacttctgacctcaggtgatctgcccgtctcagcctcccgaagtactgaaattacaggcatgaatcactgcacccagtcagtatcttggatttttgtgtgggactggaagatgaaatgtggagagatgttggctaggaaatggcctttgacctagatttaggagagtccagttagtccccctctcaagtcttttctcttctcctttgtagaaaatgatgaaagacaataacctagtacggcacttggatgcttgtgagaccatgggcaacgccaccgccatctgctctgataagacaggcacgttgaccatgaaccgcatgactgtggtacaagcttatattgggggcatccattaccgtcaaatcccaagccctgatgtcttcctgcccaaagtcctggacctcattgtcaatggcatttctatcaacagtgcttatacctccaagattctggtaagcatttcctttgcgtagacacttagagtgggtggttggaagggaacatccattttctctgaaatgaacccccttattgtttacactgcctaaattgccatcccacatcccatttctcacgctggagtgaacatgtttgggtgagactacagaaaaatccctgggagtcaatggagggttggaggtaagggcctgtaagaatctatggccaggaaataccctcccaattagcatgtaaaagcaatgtctctaaggagggaaagtagaaagtaacccaaagtagaattgggcttatcagaagtaaattactcactttctagaaacaagcatagtgtattagaataagacccacacaaggcgagacaccagcactaccactagagcaaactacaaaatccctaagccctggatggcacaaggatcacggttaccactgacccctctctgcctacccttgaaaaacaacaggctaggcatagtggctcacttctgtaatcccagcactttgggaagccaaaatggtaagatcgcttgagcccaggagttcgagaccagcctgagcaatattgtgagacctcatctctacaaaaataaacaaaattagccaggcatggttgcgcacctgtagtcccagctactccagaagctgaggtgggaggatcacttgagcctaagaggtcaagtctgcagtgagctgagatcacaccactgcagtcaagcctgggcaacagagcaaggtgctatgtcaaaaagaaaaagaaaaaagatgccaggtgctgtggctcatgcctgtaatcccaacattttgggaggttgaggtgggcagatcacctgaggtcaggagttcaagaccagcctggccaacatggtgaaacccggtctctactaaaaatacaaaaattagctaggcatggtggcaggtacctgtagtccctgctactcaggaggctgaggcagaagaatcacttgaacctgggaggtggaggttgcagtgagccaaggtcgtgccactgcactccaggctgggcaacagagcgagactccatctccaaaaaagaaaaaaaaaaatgttatttcccctatgagctccaggtatataatgtgaaggctttgtaaatgagttctttctccctaagttctctgccttgtcaaggcatcttactcaatagtgctgtgtatatttcttctcccagcctccagagaaggagggaggcctgcctcggcaggtgggcaacaagaccgagtgtgctctgctaggctttgtcacagatctgaagcaggattatcaggctgtgcgtaatgaagtgcccgaggagaagctctacaaggtgtacacctttaactcagtgcgcaagtcaatgagcaccgtcatcaggaatcccaacggtggcttccgtatgtacagcaagggcgcctctgagatcatcttgcgcaagtgagcacccccgaccactctgcttcccttcaagatcctctcctcaggaaggcatgggtgcacaccccacactgaacccatgtgaatgagggagccctccagccaggtggtgacataataactaatatccaagcgtctactcaggccacgcatgttttttaagtgcttaaggtggcttgttgtatttaatcctcacaactcagtaaggtgggtactatgattatccctgttttacagatgagaaaacagagatataaggaagttaagtatctcactcaaggtgatacagctaatagtggcacagccaggattcagacctggacgatcctaagtttccatttcctaatctgaaaacagagatagccatactcagctcctaaaagtactaccccctcactgtaactaaatgattcaatgtatgtaaaatgccttatacataacaagtactagaaacgtttgttctgtgttctcttttccttctctttccttcccattcccatttctgattacagggaatttacataactttaaaagtgactattcggccaggcgcagtggctcacgcctgtaatcccagcactttgggaggccgaggcaggcagaacacgaggtcaggagttcgaaaccagcccgaccaacatggtgaaaccctgtctctactaaaaaaaaatacaaaaattagccaggcatggtggtgcgtgcctgtaatcccagctactcaggaggctgaggcaggagaatcgcttgaacccagaaggcagaggttgcagtgagctgagatcgcaccactgcactccagcctgggtgacagagtgagactccattacaaaaaaaaaaaagtgactattaataaattacccatagttcatcaaaagttggcactatacctaagtagggctgaattaaccagtgctccaacatggctttagccaccttcttttaatcagcacattcttgtataggaaacctcccccaaaccaccagcaccacacagtgagcactattctaaatactcggattgaaaaagtctctctgccttcaagaagttcaaaagagcaggtgattcacaaatgacttgcattgcattcacatatgggtaagaacagatgacatgggagaatcccactctctatatatctagaccttaactccatccacagcccacctaccttggaaagagggactcagctgggtgatgaatgaaggaaatgtttggccacacttggagcaatgtctttaggaataatacagagttgccaaaatacctgtcaatgattgtagaaacgtattgagtgggaagggagacaccgcgttcttactgtgcgcctccccaggtgtaatcgaatcctggaccggaaaggggaagcagtgccattcaagaataaagacagagatgatatggtacgcactgtcatcgagcccatggcctgtgatggactccggactatctgcatagcttaccgggacttcgatgacacagagccctcttgggacaatgagaatgagatcctcaccgaactgacctgtatcgcggtggtgggcattgaggaccctgtgcgcccagaggtgagagggtgggaagccacccaggagtctcaggaagtggggtactagttccctttctagttgtgaccccaggcaggtaacctaactgcctctcacttagagggatagaagtttctgtgcttcctgcttcacaggactgctgtggagtgccagtatgatcgaatgtggcattcctaggactaatgctgtctgagtgttgagaagcaaagggcttattgggctcattatttggtacttaagtgttgtcaggaggtcaatttagccaggacaccaactttgtctttagctccctcctttcaatcaacacattctttttgagtacctgctgtgtgctgataactattctagacactaggggattgaaaagtctctgcttctaagaagtttagacagatggactattaattctcaaggcccagaggcatgagagggtgtcatgcatgtgggaaattacaaagagctgatatggttggaacatgggccaggtgggtggagagtggcaaaagcttctgctagaaaagaaagcactggccaaatcgcaaaatgccattcatgccctgccgagaagtctcaattgtaagtgaaagagcaagtttttacacctcactcccaaagcaaatttccccttcaactcatggtacaatagggcaaattcaaatgtgactgccgtgggtaggacagaagtgaggtggcacccaacagtatcaaaatgaccagacctagcccatgctgcatggcaccacttctagggtgcctttctcctgtctgccacaaagggacagacaaacagggacagcttaccagggtcatcaccctcatctgcgcctttcccctttcttcactctccataggtgccagatgctattgccaaatgcaaacaagctggcattactgtcagaatggtgacaggtgacaacatcaacacagcccgggccattgccaccaaatgtggcattctgacacctggggatgacttcctgtgcttagaaggcaaagaattcaaccggctcatccgcaacgagaaaggcgaggtgggtcctggctagggggaaccaggacctcacctgacaaggaaaaggcgggttctagcataaggcatctgggtcatgtgcgggaaggtgggtggtttctaaagtgaaagctattcgtagtgaaacatctccttgtaccaaactgctgatatggtaacattgggagttgccggctgggcgcggtagcttactcctgtaattccagcactttgggaggccacggcgggtggatcacaaggtcaagagatagagaccatcctggccaacatggtgaaaccccgtctctaccaaaaatacaaaaattagctgggcatggtggcgtgcacctgtagtcccagctactggggaggctgaggcaggagaatcacttgaacctgggaggcggagggtgcagtgagccaagatcatgccactgcactccagcctgggcaacagagcaagactccgtctcaaaaaagaaaaaaaaaagagggggggagttgcttgtgaatgaagcttgctagcttcattcacaagctatcttttgagacagtgtcactaacttttcttgtctttctgctttttcagttttttatactgacttccccctagcccacccctcctgtgtccctgccctttggctaacagtggctaaaggagaatgtggtctggcggtggcacagatccaagctttcctgagctacatagaaatcaaacctaagacctcagaagcaccactttacccacccgagccaacagccaaccctggcccacctcccattaaaggtctgggaaatgggggattggctgccaggtagggacttgggaggaaaaagaaaaaaagcagggcctgaatggtcatcatccatgaatctacccttggagactggttggctgtttcatctctgcttaatccagaataacactttcatgtgggactgtggtgtacccaatctcccagtgactccaagtgtatggagaagttaagattttcctggatagcttttctgcatttgactgatccaggtgtggtctggtgttggcaggtagagcaagaaaagctggacaagatctggcctaagcttcgggtcctggcgcgatcttctcccactgacaagcacaccctggtgaaaggtgaggttggcttccaaataggtgcctgcaacagctgaaggcaggccagggcgaggacagataagaaccaccagccaaagccactctcctgtccaaatagggaggtcctaggagagctcccaggctagtggggagaacatacagttagcaaacatctgagcccttggtgagtatgacacacaataaagttgttgggtttttattttttttattttttgtttttatttttggagaccgagtcttgctctgtcacccaggcaggagtggagtggtgcaatctcagctcactgcaacctccgcctcgtgagttcaagtgattctcctgcctcagcctcccgagtagctgggactacaggcgcatgccaccatgcctgattaatttttgtattcttagtagagacaaggtttcaccatgttgaccaggctggtctcgaactcctgaccccaggtgatccgcccacctcggcctcccaaagtgttgggattagagccgtgagccaccgcacctggcaattgcatgggttcttaaaaacatgatcatgtcttatttaccaatagtactgtgaactaggcagggcaggtattcccattttacaaatgaggaagtttgaggctgagaagacaagtaacttacccaaattacccagctggtacgtggaaatggtgcagtttgacccctaggtctctgccttgaaatccatcctatgtgttcttcatagctgtcttagggtaccggatgaggacaaacttagttcagtgctactcatgaaacaacttactgcccttaggtggttcctgtagaacttctaggaaagggaaaagggaaggaaagaagaaagtagaaggagtggcgggtggtaggaactgaagggtgggggagaccagaaaagctcactgtggtgtgtctgtttctcccaggcataattgacagcactgttggggaacaccggcaggtcgtggctgtcactggtgatggcacaaatgacgggcctgctctgaagaaagcggatgttggttttgccatggtaagctcagcacagtgtctctctgattgcaagctgccttctccatcaggaagccaggtccggcttctggttgcctgctgcttgctacacctgcatagcccatggggtgcttttttgtccaactccatctctcctatctaccgggccaatcatgatatatgtaactggggacccatcaagtatgaagaatagataagagggagggaagtcatgaagaatcatatgcaggaaagccagaccaacataaacttgcctataaacatgtgaggttgtcaactaggcaaactctagaagatttgtgttccctatggtaggcgctctgtgtggctggcaccattgggtattccgcttttcacttctgaggccaagagcatcagaatcacttggaaagttcatgtgaaatcacatgttccaaggctccacagttagacgtcttaattcagtaggtctgggatgaataccagaatttttttttaacaggcacaccagttaattctgatgttcagaaaggtttagaagccccccagattctatcctcacactcaagtagtttatgattataagcctcccatacagattgaactgttggtgatttttagcagtggaaggacatttaagaagtcatctatctttagagaactcttttttttaagggttttattctaggaaatttcaagaatatgcaaaaatagggagaattgacaggtacctgtcactcagcttcaactatgatcaacacatggccaatcttgtttcagtgattcccccccatttacatccccagtcttcagctgaattgtttttgaagcaaatgcaaggcatcatgtaatttcatccttaaaaatttcatggccgggtgcagtggctcacacctgtaatcccagctactcgggaggctgaggtaggagaatcacttgaacccgggaggcagaggttgcagcgagccaagatcacgccactgcactccagcctgggtgacaaagctagactctgtctcaaaaaacaaaagagattccccctcattgactatttgattactctgaggcgggcagatcgcctgaggtcaggagttcgagaccagtctagccagcatggtgaaaccccagctctactaaaaatacaaaaattagctgggcatgatggtaggcgcctgtaatcctagctactccggaggctgaggcaggagaatcacttgaacctgggaggcagaggttacgatgagccgagttagcaccactgcaccccagcctgggtgacagagcaagattccgtctcaaaaaaaattttcttttcattatatggggggatggtgtggggcaaaaaaaaaaatttcattatatgcctctaaataataattatatatcaataatctatatatctaaaagaatcttaataccattatctcagaacaaaatcgatgcttccttactatcatgaaatttctagtttgttcacattttcctaactgactcaaatgtttttatagtttatttgcccaaatcaggattcagataagatccataacttgcagttatttgatacatctgttaagtctcttaacctatctcttggagtgcgcctccttccagctgtaccagtagctgtactagctgtatagtaggtttctatacaaacccatagaatgcagattcacccactcaggccccaccccagatttactgaattggaaagccgggaactggggcccagaaatcttaattaattatgttaaatctgttaaatgtgttttgacaggctctctcagtgattctatgtaccctaaactttaagaatcactgatcttataggatctctatgttgggagtccccaaaaacacccctatattcatggggttgctaggaggactcatgggacttggcatatagttgtactcatgactaagattcataacagtgatgtagtaagaatacagttggatcataaaagaaaaagacaatggcagaatctggataaatctatttgcagtctttcttatgctctccctcccatgaggagtcaaacagagtccattctttccccactaatgaaaacacagaaatatatgtgtgatgttctgcctagggaagcccatcatggacttagtacccaaggtttttcttgaggctggtcacataggcaccttctgcctagcacataccaaaattccagactcccaaaaggaaagcaaatgttcaatgtaaaccacattgttcggacacagtctagacacaatgagccacctttatcagttagttgttgagggcaagcattctgagagcccatttcccagaagccagccaagggcccaccctgcaagcattccttcctaaggacagtcgtctcaggcctgctgtgttaactctcttttgcacaatccccctccatcttttttcctagcaacttagttttgaaggaagtgggttgtttgtctgcagagactatccctcagtatagattttgttgattatttcactgtgatttcctttaacgtattattttcttccttatatttcctataagcaagtagttggttctagaagttatcagattctagaccctttctttcattgagggctgcaaaatgacaatattgtaattctttatttattaacttaaatacttacataaaaagagattcccggccgggcgtagtggctcgtgcttgtaatcccagcactttgggaggctgaggcaggcagatcacgaggtcaggagttcaagaccagcctggccaaaacagtgaaacccgtctctactaaaaacacaaaaattagctgggcatgatggcgggcgcctgtaatcccagctacttgggaggctgaggcaggagaatcacttgaacccgggaggcagaggttgcagtgagccaagatcacgcctctgcattccagcctgggtgacaaagctagactccatctcaaaaaacaaaagagattccccctcattgactatttgattactctgaggttccaatcctacctgaaaggtaggtttttggtttgttttttaattactggttttttttaaaatgatgagttgactttttaggaacctccaaaggtgaccaatgagtggatttttttttaagtatcattacgaattcatagatttaagtatatttgatgtgtttcaatccactgctcttagtatggttttgatgctcaaagtgatccaccattaggcagaagaggcctcttcaacattgctgagtcctttagatacaaccccagttgtttttaatagctttcttggtttattcttggttttttcgttcttttttatcctggataggagatagtccatttctccaaggattcctgcttcattttaatgtgaaatggtatttattttatttatttatttatttatttatttatttatgagacggggccttgctctgtcacccaggctggagtgcagtggggcagtctcggctcactgcaacctccacttcccaggttcaaacaattctcctgcctcagcctcctgagttagctgggattacaggcagctgccaccaagcctggctaattttttgtatttttagtagagatggggtttcaccatgttggccaggctggtctcaaactcctgaccgcaagtgatccacctacctcaacctcccaaagtgctgtgattacaggggtgagccaccgcgcccggcctgaaacggcctcccaacactttgggaggccaagggggaaggagcactagagaacacaattggaactcaaaggtgttccttgctactgagtagatctttgtttctaagccttttcagtggacaaagctaagaagtatgctcttaagtctcacttgcttttgtgtttgttttgtgtttgctcacaaagagaaaatacttcgtgaattcatatttctgtttttcatttacttttagaattacatattttttattccacttttagaagaaataataattttttaaagaattatagatgtctaacttcctgatttataactttctaattttattttattttattttattttattttattttatttagttatttattttgagacacagtctcactctgtcgcccaggctggagtgcagtggcatgatcttggctcactgcaacctctgcctcccaggtacaagcagttctcctgcttcagcgtcctgagtagctgggattacaggcgtgtgccaccacaccctgctaatttttgtattttttagtagagatggagtttcgccattttggccagagtggtctcaaactcctaccctcaagtgatctgcccaccttggcctcccaaaatgctgggattacaggcatgagccaccacacccagcttctaattgtatttaacttccctgattttatgtttgtatcccttaagctgaaaattttgattcctaattgcattaacatgattattttttgttttattctaaaatatttcaagtagttacaaaatatcaataatattaataatacagttactctgccaaaaacaattaaatatttttctcatagttccttttatccataggtatatgctaccaggaatgtgccatcaaattattgtttttaagtcatttgtaacatttgtctgtgtgtgtgcagttgtgctaccaagtggctaccagatcatttatatcatgttactttccgttttggagattgctttttaggccagtgtggtggctcacacccgtaatcaatcgcaacactttgggaggccaagggagaaggagcactagaagccaggatttcgagaccagcctggacaatatagtgagactcccatctctaaaaaaaataaaaaattagccaagtgtgctggcacacacctgtcgtcccagctactcaggaggctgaggtgggaggattgcttgagcccaagaattcaaggctgcagtgagccaagatcacacctctgcactccagcctagatgacagagcaagaccctgtctcgaaaaaaaaaaaaaaaaaaaagcaagagagataaaatacatggttctaaagtcaaatgtacaaaacaaggtatattcatacaaatccggcttccaccctcattgcctttgccttgctgcttccctcttaattcaataggtaatttttttctgtcgtttttggtgtattcttctgtttgctcctttaaagtataatcaaatgcagtctgggcacggtggcacatgactataatcccagcactttgggaggccaaggcaggtggatcacctgaggtcaggagttcaagaccagcctggccaacatgatgaaacccctatctctactaaaaatacaaaattagcccgtcatggtggtgcgtccctgtaatcccagccactcaggaggctgaggcaggagaggagactcgcttgaacccaggagtcagaggtagcagtgagctgagatcacaccactgctgtccagcctgggcaacagagggagactctgtctcaaaaactataaataaataaataaataaataaataaataaatgtaatatattcatggcctgcccccttagataagtgataccataccatcaactcatttttctacctttctttcttcacttaccaacataacttagagattatttcataatagtaattataaagctgggcgatatagagagacccccatgtctacaaaaaatttaaaaattaaccaagcagggtgagcaaatgcctgtagtcccgttactcaggaggccaaggtgggaggatcattggagccccagatgtggagcttgcatttagctgagatcctgccactgcactccagcctggacaaagcaagaccttgtctcaaatttttttttaatttaacttaaaaggaaaattttgaacaaagatgaaattttggaactgtgctgccatactactactcctagaacaaatgcagagtttctcaaaggtgtcggaataacatgggcttaagtgagatactggcagtggcaacagaaatgtgagaatttggaggtagaatagacaggatttgctctctaccttttaattagtttccaaggttgagggagtaggaggggagggtgaaagggatatcaaagatgattgtaattcccagtctgagctcaacagtaaggttggtggcatcaggccgcagccctcctttctctagagtgacagtgacacatttgctctttgttttcttttgtgtgactagtgtgccctgtagtatttacactgacttcggaagcttcctggaggtcaggaaatggagcctgggctttatccactccctcactgttttccctcccatcttacctcagggcatcgcaggcacagatgtagcaaaggaggcttcagacatcatcctaacagatgacaacttcaccagcattgtgaaggcagtgatgtggggacgaaatgtctatgacagcatctccaagttcctgcagttccagctcactgtcaatgtggtggccgtgattgtagccttcactggagcctgtatcactcaggtgaagggggtgtgggtgggctgagacgggagggatgagtcaggggctaaggaacatggagtgaagactacggtgtgtttactgaagagtaaagacagcgtttccccatgacattgggacaggagttagctcttctaagtctgctgtcttcatctgcttatgtagatggtaacttacaggccttagcttagcacttatgtgtcagccactgtaataagcatttatatgcactatctgtattcttcaaaaatgaccttgtgaagtaggtattattatccccattttatgggtgaggaacttgaggctcaaggaagttaagtagctttctcacagtcactcagctaggaagtggccagattccaagtctaggtgggtcgtgggagctgggccatcgacagggcaaaggtgggctggtttcagagaaaagctaaaaggactggttcttctccccgccaggattccccattgaaagctgtgcagatgttgtgggttaatctgatcatggacacttttgcttcattggccctggccacagagccccctacggaatctctgttgaagcggcgcccctatggccgaaataagcctctgatctcacgcactatgatgaagaacatcttgggccatgcattctatcagctcattgtcatctttatccttgtctttgcgggtgagccactttgggggtgggtagcagctggggtcctggttggaggtgggggcagagaaagaaggtagcgtgagagcaagtgcacaggtcaggaataagcgcagcttcacctcccagtgcttgctgtgctcccgctacacggtgcattatgctactatatgtactcatacagtactcttgagtacagtgtgtactgtgtgtactcaagaatttcacaagggaggctttattatttctttctttctttttttttttttttttttctttttggagacagagtctcgctctgtcacccaggctggagtgcagtggcgctaactcgggtcactgcaacgtctgcctcccaggttcaagtgattttcctgcgtcagcctcccaaatagctgggattacaggcatgcgccaccacacccggctactttttgtatttttagtagagatggggtttcatcatgttggccaggatgggctcgatctcctgaccttgtgatctgcccacctcagccccccagagtgctgggattacaggcatgagccaccacgcctggcttatttctttttttacagattcaaaaaattaacctcaggtcccataatgagtacatagttgcagtaaaattcaaacctatgattgcctgactccagcgcacatagtcttactaccatgctgcactacatgagagcaagtatcaatgcagcaaactgagagagaaggtaaaataagtcaagaccagaactaacatttaaaatgtttaataactagtacaacaaaaaattagccaggcatggtggtgcacgcctgtagtcccagctatttgggaggctgagatggaaggatcacttgagcaggaaggtccaggctgcagtgagccatgatcatgccactgcgctccagcctgggtgacagagtgagaccctgtgtcaaaaaaataaataactagtgcagctcagatattgattaattagaatggacaccagccataagcaagcagtatatctgtaccaacacattcttactcttagttcagaccacacttaacctccagtgcttctcctctccccactaggtgagaaattctttgatattgatagtgggaggaaggcacctctacattcaccacccagccagcactataccattgtttttaacaccttcgtgctgatgcagctcttcaatgaaatcaactcccgaaagatccatggagagaagaacgtcttttcaggcatctaccgcaacattatcttctgctctgtagtcttgggcacattcatctgccaggtgagattctatctgcagttggggcaggagatctggaatgataaagggcagaagctgggagccagggttccctacatacctaggaaaaggaatgaaggaattacggggactggagctgtaagttgaacactttgggattcccaatctgctttcttttgcatattgctctagaattggagcccattgtgtcaagagctccagtgcagggcagcatgttgactggaaataaaataatacttctaaaatcctttcatgatctttctaaatacacagaaatttcacagaatgaccaaaagaagtattctcttctagtccctttctatggctcctgtcagcctatatgaaatgtgcatgcacatctagtatagactctccctgtccctgccctttgttctgaagggcttatgataaaaagtgttgtgcaactcaaagaaagagaagtaatgggatttgtacatgtatattacatagtcagcccagcttggactcctccaatatgagactatgagctgatcatgtcccatccctcagcagggcacctccctttatttgtccccatcctcaattcctttttttttttttttttaattttaaaaatacagatggggtctcactctgttgctcaggctggtctcaaactcctggcctcaagcaatcctcccgcctcccaaagtgttattacgcctgccattttttctttttgttttttttttcgtttgagacagatatctctctctctctctctctctctctctctctctctctctctctccctctgcctctctctctctctctcttttcccccctcccccagggggagtgcagcctcagtctcccaggttcaggcaatcctcccacctcatcctcagttcctaactccatcactgtaccttctccttgtcactaactggctttagtcacaagaagccaccagctcccctaactcctccagattgtctgttaatcatagtcacagtaactatgtctgtctccccatcagagtgctcttaaaggctgtttttgtctgtctcccctttgagatttcttcttttcccttcccctgcaagcaaatcgggacttgtacccaaggatcctgaggagtgggatgatgtggctttgggggccttggctggagggccagctgcctgttagtcatttccttgatggtgggctgcccctttctctgttctagattttcatcgtggaatttgggggtaaacccttcagttgtacaagcctcagcctgtctcagtggctgtggtgtctcttcattgggattggagaacttctgtggggccaggtgagtaccggcacaccctcctggtgcattctcacagcctgcagaactcccctcctctacatgagatggaacaagcaacggtggagaccccccagctcctcatcttcatcttctcctcttccctccccacccccactcaagttttcaagttcttgccatctcataggatctcaaggtggaatgatcacttcagaggtttcagaattcttctctaactaagcctggaggtagaaaaatcccttagcttggctgggcgcagtggctcacacctgtaatcccagcactttgggaggccgaggcaggcagatcacgaggtcaggaaatcaagaccgtcctggctaacatggtgaaaccccgtctctactaaaaatacaaaaaattagctgggcatggtggcaggtgcctgtagtcccagctactcgggaggctgaggcaggagaatggcgtgaacctgggaggtggagcttgcagtgagccgagattgcgccactgcactccagcctgggcgacagagcaagactcagtgtcaaaaagaaaaaaaaaagaaaaatcccttagcttctctgagacagaaaccaaacttttcaatggaattttgctacaaaaaaaaaatatataataagggtcttagaagtagaagagtttacaagacacatgtctttattctcatgaggcagcaacctggctatgggctgtcgagctgacataattcagggtttccagcctcttctctttcttgccatggctttatctgggtggaattcttaactcttacctgagataaattcagatttacaagatctctagagtagcagtatggcctgtggttcagagcatggactctgggaatgactgcctgggtttgaatccagctctctgtttttttttttttttttttttttttctgagacagagtcttgctctgtcacccaggctggagtgcagttgtgtgatctcggctcactgcaaactctgcctcctgggttcaagcaatttctcctgcctcagcctcccaagtagctgggattacaggcaaccaccaccgcacctggctaatttttgtatttttactagagacggagtttcaccttgttggctaggctggtctggaactcctgacctcgtgatctgcctgccttggcctcccaaagtgctgggattacaggtgtgagccaccgcacctggcccagctcttgttgcccaggctggagtgcaatggtgcaatcttggctcactgcaacctccaccctccaggttcaagcaattctcctgcctcagcctcccaagtagctgggattacaggcacccaccaccgcgcccagctaattttttgtatttttagtagagacagggtttcaccatgttggctaggctggtctcaaactcctgatctcaggtgatccacccgccatggcctccgaaagtgctaggattacaggcctgagccaccgtgcccagcctcagctctcctttttataagctgaatcatcttgggcaagttacataaccaatctgtgtctcagtgtcttcagcttaggaaaacaaggtcattgttaattagtgaatcagttactatacagtaatgaataatgtcttattccttataaataatcaaattttaaactattacgattataatagtatcattaagtctaatagtttcacttcttccttaataccactttacaaacctccctcatcctcagctctggcctgggctatacctctctttacagaccccaggtctctgcagataatcccttagtgtccagccacccaggtaatggacactttgccctaactggcctcaaagagccatttctggagctgcaggccttctcccctaaacctgctagttatttatttcatacctagatgcctccctgaataatttctttttcttttcttttcttttcttttttttttttttttttttttaagagatgggggtctcaggccaggcgcagtggctcacacctataatcccaacactttgggaggctgagtcgagcagatcacctgaggtcaggagttcgagaccagcctggccaacatggtgaaaccctgtctctactaaaaatacaaaaaaaaaaaaaaaaaattggccgggcatggtgacacatgcctgtaatcccagctacttgggaggctgaagcagaattgcttgaacccgggaggcggagtgcaatgagctgagatcacggcactgcactccagcctggatgacaagagtgagactctatgtcgaaaaacaaaaaataaagagattggggtctcactatgttgccaggctgatctcaaagtcctgggctcaagcaatcctcctgcctcggcctcccgaagtgctgggattacaggcatgaaccgctgcacccagccctccctaattaatgtctgacccaattccctccaccctgttctgtttggtgaagatttctttttttttttttttaccaatgggttcctaaagcagttttatgctttggtaaagcttggttgttaaacctgttgtttgaaactctgttctggctcttgcctcacatgtggccatgtggccttgctgccagacagcagccttccttctgtatcacaacagctttttccacattcagaggcagagctctggcattcttcccatttcaaaacccttgactccatatcagattgcccatacagtccctcttccccacatgagccctggctactccttatcttgtccggaaagaactgactgacaggtgctgagctcaccgggaaatttatttcaaatttcaaaccctatgtactgctccttgtcttctgataatactcatgtgacccctcttctatggactgtcccatccacttcctcacctcaagcccaagaaaacttttggtatcctttcacaagagtttgtaacacagaaactactttgcatgtggcaactaagaaaggggtcattcatttccaatacccttctcaaccccttgcctatacataggcaatatcaccatcttctccccaaactcttttcccccaggtcctggtctctgtttcttcctactgcgtaccatgctgtatagttctgttaaccttaaaagacagattgcaaaatggaacagaagaaatgagacagaaagaggaaaatgaagtatatgaccaggcagatggctggtcaattactagaatagaagctctcttttgtgtgtgtccataaatacagaaaaccttcctaaaagcctgaccgctggtgggcacttggagaatgcttgcctggatggattggtgcttctgcccactgctcttccagtgggaagggtggtagggcaaagagtaacctgcccaagggcctggctcatgtaagttgactgacagctcttctcacgctgattctgacgtcttcctcttcgctgcgcttgttttcagttcatctccgcaatacctacccgatccctgaagttcctgaaggaggctgggcatggcaccaccaaagaggagatcaccaaggatgccgagggactggatgagattgaccatgctgagatggagctgcgccgaggccagatcctctggttccggggcctgaaccgtatccagactcaggtactctgatagtggtctgtccttcccttgggagaagcagcttcccatcttggaaggtgttgggagggtagcagttcttgtcggccagcatctcttcccttccaaaggctcactactgatgggcagccctagatcctcagcttcaggacagacacgcaaaaggatctgtgtggggtcctctgagaggagaggagtcaaatgacctagaccatgggacactattagcatagtcctttagctctgggttgaccctaaagcccagcctgccaccctctatcaaatgggcaagcttcagcataaggtctcttgcaagcactagacctgaccccagggtgggaaatgctcagtttttccctacccttcagaaggaaggagttagacaatatcaatatgccaacatacccagcattcacttaatatagcttcctcacactgccattataggaatagatgctatctggaagggtctttgtaaaagaaactcaccttgttatatctcccccattcaaagtgtaaggccatggtggggaatctgatggtttcatgtgtaaaaatgacaatagtctcttgatgtctgagcatcttttgcaggattcagacttgcttcctgacaaggaggaagcaataatttcttcaagcctcttcccttcttgcaatttctgaaatgggatagaagccacccctgctgctcttatgtcccctgtctatagccccacaataacttttattttttccactttccatgcatcaattgtaactactttctcctgggtgaatgcgctgatctaagcattgataattctgtcttcccctgctctcaccccccatagctttattgttttaatcctgagattttccatttcaaaaacactgtaaattccaagatctcaagggtggtctccagaaaacaggcgtatttctctctgctgattggctagagatcttcaaaataagtttcactgtctaaaactggccttgcaaatgttttagaaagttccccagtcggccaggcatggtggctcacgcctgtaatcccagcactttgggaggccaaggtgggtggatcacctgaggtcgggagttcaagaccagcctgaccaacatggagaaaccgcgtctctactaaaaatccaaaattagccgggcgtagtggcacatgcctgtaatcccagctactcgggaggctgaggcagaagaattacttgaacccgggaggcagaggttgtagtgagctgagattgcgccattgcactccagcctggccaacgagagctaaactctgtctcacaaaaaaaaaaagactgggcgcggtggttctcacctgtaatccagcactttgggaggccaaggcaggtggatcccctgccttaggtgaaaccccgtctctactaaaaatacaagccaggcatggtggcacatgcctgtagtcccagctacttgggaggctgaggcaggaaaatcgcttgaacccaggaggcggaggttgcagtgagctgagaccacaccattgcactccagcctgggtgacagattgagagttgtctcaaaaaaaaaagagaaagaaaagaagttccccagtcaatcccacctcgttagtgtataggagagatagatggagtgaatattctaaactatatacctggtaggaacttatcccctataggcaagacaacaaatagaaaagtggaaaagaggccgggtgcggtggctcacgcctgtaatcccagcactttgggaggccgaggctggcagatcataaagtcaggagttcgagaccagcctggccaacatagtgaaaccttggctctgccaaaaatacaaaaattagctggacgtggtggtgggcgcctgtaatcccagctactctggaggctgaggcaggagaatcgcttgaacccggaaggctgaggttgcagtgagctgagatcgcgccattacacaccagcctgggcaacaaggcaagactctgtctcaaaaaaaaaaaaaaaaaagaagaagaaaagtggattgcagactcactatgcacctgactgtacttccaggcaggtgctttttctgtctgccagagaaacattccagggtgctgtggctgcctcacctatccagggcgatgcagctccctggggacacaggtgcttcctggggagccctgagcacttctccgtgttgctggcctcacatccaattgggcaggcattggagtccgggcactgcctggagctcaccagaaggtgctttacagtggtccttggtttgtctctcagagggcttggtcccctctgctgtgaggctggactgcagctgtggtggcaagtgaccagatgtcactgagcagcctgaccatggtctaggtggtgcttggatgcatccacttggcttcctttggtcattgagtttcaagaagagaaactccaggagacggcttggccaggatcaggcaaaaacaatcatgccgaaaaagtggcagaaaagcttgaaggtctctcagtgaaggaggagaccaaggaggatgctgaggagaaacaataaatcgtcttattttatttccttttcctctctttcctttcctttttttaaaaaaaaatttaccctgcccctcttttttggtttgtttttattcttttgtttttacaagggatgttatatgaagagctgaattaaaaaaaaaaaaaagaagaaaaagaaaagtggaaaagggctaggtagggaaacgctagggttccttttccctctctcaagttcctcctctcagaaagaaaatttccagcgggacctacacaaagtgcctcgtggcatccaggcatccagaatccccacgctcactccctaccccaccccacactccaggctgctgactccaagtacccatagaacctggcgcctttggctcccatctctaaagcccccagtgctttcctttgggtctgctctttccaaaataacctgtctttgctttgtttttcttcaggatcaaccacttctactatgtgatttcttttctcctagccaagattccctcagtccagtacctccttgctcctttccagtcttctgtcctgggaggctgagatttatgggtcttccttgccctccactaccaatttctatttccttgactatgcccctctctacaaggtctttttggtttcactgcctacatagctttaggtatactacctttccgcattgttggagcatgaggcagttgggccaaaatggcattaaagcctaaagtgaggcatgttcaagatgccacagtgaccaaattcacgccatccaggatgcacctgactctggaagctgatgaggctaatgatgctaacgtgtatcctggatccctgaggtccgctcccaacatcagcccttcagcctcagctgggttctaacaaaaccccctgccacctccacgttgatctttgttgtcattctcatcgcagtgctttggtatgggaggtgttagaaaacttagagactagaattgtggaggttgggaccttgtaactccaataagcactgaagaaggtgtctctacagtcccttcttccatggagctggaacccccgcacccaccccaagtgtaaaccctctcctcctgcaggttcaagctcctcagtcccagggaactaaaactgaataatgtgaggaagcagtgatgtttctgctcaaactgtgatctggatccagaaactagccctaaacagctcatggcttctcaggaagctttataaaaggactgtctcactcacattctgcctactttcccatcttccctcctgggaaaatgaagtccagttaatggaatcagcacctttccttcattcctggtagattaacccttggcattaagcagatagatatttctaagattattctaccagattcatgaaggctaaagggaattccttttgattttgtccttgttacttaggggtcagggataaggatggtagagttgattgaggccctagatcaggaccattgtcagaaaatgaatggcatggccgggcgcggtggctcacaccttaatcccagcactttgggaggctgaggaaggcaaatcacaaggtcaggagttcgagaccagcctggccagcatggtgaaactctgtctctactaaaaataaaaaaattagctgggcatggtggcaggtacgtgtagtccctgctactcaggaggctgaggcaggagaatggcttgaacccagcagatggaggttgcagtgagccaagatcgtgccattgcactccagcctgggtgacagagcgagactctgtctcaaaaaaaaaaaaaaaaaaaaaggaaggagggaggaaggaaggaaggaagctgggcacagtggctcacgcctgtaatcccagcactttgggaggccaagaccggcggatcacgaggtcaggagattgagaccatcctggctaacacagtgaaaccctgtcactacttaaaatataaaaaattagccagcctggtggcgggtgcctgtagtcccagctactcaggaggctgaggcaggagaatggcgtgaacccgggaggcggagcttgcagtgagccgagatcgcaccttgcactccagcctgggtgtcaaaaaaaaaaaaaaaaaaaggaaggaaggaagaaaatgaatggcattaattgcctctgtctctgaggaacagggcactgaaaaccagaggctacttgtgtaagcctcgacctgtagctgtttcaaccaccaccaaccaaaacctcttcctccccctccctcagtctaattgccgagttactgtcagcatttctgccagacatttcagatctctaatgcattaatgcacttagtagcattctcgatagtgggcttggccactgggttcttgagctccattctcagggagcctacctacttcagcccagggaagggatagctcagacaagatacccagaggaggatgagcccagcaactcatggcccaggggtctttccatcatggccatttgtatattggctactaaatggcccctgttttttatttaaacacatgagttattttcctggaaaatccgcaaaaatacgtagtcggtttaattgatttagaggttcctgagccttcaaattcagtaatacataatttgccttcagaatcttcaattgtttgccttatttttaagagtacaggtaaaaaggggcctgtaggtggaggttgcagtgaaccgagagtgtgccactgcactccagcctgggcgacagattgagattccatctcaaaaaaaaaaaaaaagtacaggtaaaaacaacgaacaatcgctgtctagctgttaggagtgatggagtagggaaaagtccctttacattttaaatactcttggccccctctaaacctcaaatgcccactgtggattcaaagggaagaaaaaactagattctggctgggcgttgggactccatggcaaattgttccctaagtgaagtatgatatgcaattaacgtttttctccttctcctcaccattgctttttgtgggagggaagctctctcttgctctctcctgtccccttttcccatctacttccattcctgcttccccaaccttccatgaccctcccttcctctttcttcacctctctcggactgactgtggagcaaagctgtctcactctctgattctttgcagatcgacgtaattaacacattccagacgggagcctcttttaagggagtcctaaggcgacagaacatgggtcaacaccttgatgtaaaacttgttcctagttcatcctatgtagcagttgcaccagtcaaatcttcccccaccacttctgttcctgctgtttcatctcctcctatgggcagtgagtgatagtctattatgatgcatgatttgctaaaatgaccacaagagagcacgtggcatccactttaaccaaccatggttatcttttccttttggtttttccctttgatattttgacttaagggaagaaaaagacaaaaatcctactctaaaaccagactgtgtgcccttgtattttatttttgtaatgtagaaaagctattaaaccttaactgttttaaagacaataattctgttttctgattgttcctctgcattgctcatttcttccttttcttgagttttgttttgttttgctttgccttttttgtttgtctgtttgttgctttgctgggatatgttgttgttcctctcttctcctcctgctcctttgagtctgaactctacctcctaagcttagatgtgaggttaggccagaggaaaacccaagagctttctttacatgggggcaaagtttgggatcttttgaggaaaggtaggaagggagctaatgtgcccatgggtgtgttttgactagtggacctgtcataattgagccagtattaaacttggtcaataataatagtccatttggccaccactgtattgctgactggcaattttagcataaaagttgtagctggctgggcacgatggctcacgcctgtaatcccaacactttgggaggccaaagcagatcacgaggtcaggagatcaagaccatcctggctaacatggtgaaaccccgtctctactaaaaatacaaaaaattagctgggcgtggtggcgggcacctgtagtcctatagctactcgggaggctaagacaggagaatcacttgaactcaggaggcggaggttacagtgagccaagtggagagccactgcactccaccctgggcgatagagcaagactctgtctcaaaaaaaaaaaaaagttgtagctataggtgaagaaaagaaagtagttcagttcaaatgtatatggttgaacatccccgttattttacttttctgggactccggtttaaaaatcagttaatcttggctgggtgctgtggctcacacctgtaatcccaactttaggaggccgaggtgggcggatcacctgaggtcaggagttcaagacctgcctggccaacatggcgaaaccctgtctctacaaaaatacaaaaattagccgggcaatatggtgcgtgcctgtaatcccagctactcgggaggctgaggcgggagaatcacttgaacccgggagtcagaggttgcagtgagccgagatagcaccattgcactccaacctgggctacagagtgagactccatctcaaaaaaaaaaaaaaaaaggccaggcacagtggttcacgcctataatcccagcactctgggaggccaaggcaggtggatcataaggtcaggagttcaagaccagcctggccaatatggtgaaaccctgtctctactaaaaaatacaaaaattagccaggcatggtggcacgtgcctatagtcccagctactcaggatgctgaggcaggagaatcgctggaacccaggaggcggaggttgcggtgagccaagatgctctactgcactccagcctgggtgacagagacagactccatctcaaaaaaaaaaaaaaaaaaaaaaacgaagaaaaaaaatcaattagttcacatgaaggtacgagaaatatacaaaagagtcaaaataacattttttcttcatttactaaacttttaggagtttctgaagaggagtgccttttattttgcttctccttttctctagtttgattgtttcaccaatagccagcacttattttgcacataaagtttcaggaagccctttctcagccggacttgcaattggagtattatcaactcacaacctaagatctggtgttcccattggtagattcttggattcttgctaatgcttatgtcttcctattcctggtcattttcccttccccaaatgggactcagagaggagagagaaggtagccagctctttgctgataatgtgggaaggagtttatctgtattaaatataatgtgggtttcaaatagctgagtgttcagtctgttccttcctcccccattcccaacctcaccaccccccaccccgacctctgcaaaggggctcaagaaagaacagttgccttgtctgtggttcacatgatcacggactgtgtgggttgaccagacttagatttgttttgtctctttagccaaagtgttctgatgtgaggaatgggggtggaacttgatagagatacatacaatttctttaggtcaaaaaaacaggcaagaaagaactcactaagtcttgccctgcaagtatccaggaacctctcccaccagttctttcatattcctctcttaattccttttttccttctagttctgccatccccttctaactagcttctgttctgttttaatcatccctttctgataggaagggttagtgtcagatatcctgatggtttgatggtggaaggagactaagtagaagactaagcagaagactgggatcttgtagagcagctggtagagggtgtgctccaaatcctcaaagactagatcagaggagagacaggccacacctgctctttctccagctgtgcctttttagttggagctcctagaagttatagccatacattttaaaaccctctttcccattccagatctccaaatgaattcaactgtttgtccaaccttcattagatagatctctaagatttccctgcatagggaggccctaatccttttcttctggtttctgaaaagagcagaaaactgcctggcgcggtggctcacgcctgtaatcccagcactttgggaggccgaggcaggtggattacttgaggtcaggagttcgagaccagcctggccaacatggtgaaacctcatttctactaaaaatacaaaaaaaaatagctgagtgcggtggcgcacgtctgtaatcccagctactctagaggctgaggcaggagaatcgcttgaactcgggaggcggaggttgcagtgagctgagatcacgccattgcactccagcttgggcaacaagagtgaaactccatcccccccaaaaaaaaaaaagcagaaaactacagaatgagaaaatggagtcttcacctgcccactcattgagctgcagagagtagccctcagcactcatacccagtctcctgagtcatgaaaagagttgcccttcaaccagccacttccacctgtaggccagggccccaaaagagacatttccccaaggttttgagaaatgatgaccaggaagggaagggttgactggctgtgtggagagtgctcaaagctttccctgcaccttcttcactagccctgtcttgtccccatacactgctcatgcaccaggcatcatgctccaggaaggggagatgccagccctgggtggattggtggtgatatagtgcatgattgttcatcagcatgtgttctctgaggccagtgctggagttggggcatcctggcacagccccatgccctctcctccctcacccttctctccacccaccaagccagctggtgctccctagctctctgacccctcttcacgtgagcttccttacaggtggctggtttccctttagattccagaagtcctgcagtctagctggatgactgtttcttgctccccaaaagacatttcccatattttttccatctacccatccccaattcacttttatcttcctcattgtttacctgtaacagtattattggtcaccccaacaggtgagaggaaaagccaacaaacagggctccagaccctcactccaaccccagttgttacaaatttattttctatagtggacttcacatgtaattttttccaacaaagtattcaattgaatggaagcaggaaattgaaaatcactgatattgaagatgatgtactggcggataaaggcacctgccctcctgtaatattcagtagaaattttgagatcttgaaaacatatgaaaaatgtgggctatgttatcactcctgacagtgatggctttgatggagtgggatgactttggacccatctcttggccagtgtatctgtgccagggtcaaaggagaaggcactgggtttggactcactcaatccaaattgccttgctctgagattttatgtagatcagtgaaaacttgagacttcctgaagaccagatggagcctccattccatctgatctcacctagatctggagcaaaggcaacatgataggtaaaatttgcacatcagatggtcaaataggaatcagataataaaaatgtggtcctcgctgtctgttcagcatggtgagtgtgtgcctgtgctccctgattcttcttggctgaggtgttgagctgatactgttgagtggcaaggagtcctttgccttctgagctttgagcaccctcagtcttgggtgggtctgcaggctgtagtagagtgggacgagataaagaaagccttagccagcagagacacattctcctccagagaaaacggaccaacagtattgatagtgagccttctttgagtggtatttatgaaggttctgtatggtggtaggaagcactggaacaggtgatccaaccagtttatttggctgactctctgtatcctctgctgtctccaaattcttgtgtcttctcctggaatatatttttggttaaacagcagaggaatgaaagaggtaccctacccccaccttcatcactcctacccctccaacctcaacagtttcccccacattactcccatttcttttctgagtgaagattttttggacaagactaggatcagccaccttccaacaactagaaccgtcctacaaccatttacctttcccctggcccctctctccaacttctcggagctccaaccctctccccctaccccaattctaccatccctgattctaagccacgcctcagagagacctgcagttcagaaaagcagagctgccaaaattgctggtgcctgtggacaagcaaaagctgttcacaggcatcaattattgtcagttttttcttgatgactctgaactgaccgaatcccttcctttttgcgcagtaagacagagactatgacactgggcaatgcatctccttttgcccagtaaaaccgcacgtggtttcctttccttcatcctcttcatccaccccatcagaaaggccacttgtttgtagcactgcctcctggattaggtttctctccctggtccctttcattcccttctccacataagactatgctcctcttcacaatttggaaacagctagagaaagcagcatgattgggcacagttgctgtgtatcagagacatgaacgtgcatttgaattatgagagccaggtcttttctcaataggcaggaggaaggcatcttttgacacctgtattttatctgctgcttctagggaaggggctgaaggagtgaagttctgtgttatttgcggggaggggacacagtggtggttgtgggatataaaaatatgcatgtttcctggctgaaagggcaaattattattagagagttttaagttcctgcatgctgctgacacaaatgaagattggtttgtctgcctggctgcacagttttcatggtcactcgtcacccaacctgtattatgtgcagattggtgtatgctggctctttgaggtctttaaacagataactaaacctcaatgcataatttttccattccacattcacaaaatgtttggcctcagcacagaaatccacatatctcaatcatctttttaagtttggctatgaatttgcatctagttcccatgtccttgccctccatctaaaagaactaatgaaacttcttgttttctgtttcattttaaaagtagattgtttgggaatgctaacgttgctttgggttttctactttttttaatgcagctttcaaaacgtcctagttgccgtcactcaccccagcccaccccactgcttgaaagttgagccatgtgatgtttctagtgccccatgatctcttctgatgtgtgtttggttttgatgctgagcagtcatgttttatagtctgggttttgtttctctcctaaatccaccatctccttgttctgccggccaattctcacctctctattttctcatcctccttttccttcccctggtatagatcaaagtggtcaaagcgttccatagttccctccacgaaagcattcagaaaccctacaaccaaaagtccatccacagcttcatgacccaccctgaattcgccatagaggaggagttgccacgaacaccactcctggatgaggaagaggaggaaaatcctgacaaggcttctaagtttgggactagggtgctcctgttggatggtgaggtcactccatatgccaatacaaacaacaatgcggtggattgcaaccaagtgcagctcccccagtcggacagctctctacagagcctagagacatcagtttgaattttctttctctgactctcatccctattttacctatttccattttcgtctatcccatctatgaggtgatgatgggacttttcattgtcacgtcagctgctgtgttaacagcagtgtgtgtgaagtgaacctctacctgaccatgaagaggcaagagcacagacttacaaggatttcaacttaagcttgacttggggtttgtagcgggacccagtcaaaccccattcaggtcatggtagaatctactccttggtagtcacttgtcatttttaaagaaatgatgacaatcctcttggcatcaccccaccccacattctccccgatgttcctctcctgaattctggattttgtcctacaagtctgtgccatttataagctaagttgagggttcagagggagacaaatatccccaagtgaaatatgttgcggtagagatggaatgtataaaatccgccagtagtgtgattgtttttcaatttttcccactttgaaaacttacacctaaaggcctgtaggcctctaactctttctgccctttcattcaaacc

SEQ ID NO: 55 - DNA, 4671 bp, Homo sapiens
gcttagactgggtacctcttgcccttgcagatgctggatacttatggctgctctaatggtttctttttgtctatctttgaacctttattccagagatccagttgtcatcggtatccaggaagctctcctcttcctcctcctgacgtctactactacagttgctggttgttgctaaggttgctgccatggtaacatgcacatcctgtttacaccttcatctgggcaagttggtctaagctaggaacctacctaccctggacaactactatcatcaccacctggggacaccaatcatcgtgacacggagtccaccttccactcagttcccccatcctcttcctcctctcgctgccagacttcatacggaagaaaggatctagacttcggacggctactcgggagcttattgcacaagatatattcaatctattccctcactgggcccccagagaagcaagaagtaggaagaagttgagacagggaggcaggagacactggtcagttgaagggaaacgctacatcttctctggttgaggggcttggtaacagcaggcaaaatgacgaacccatcagaccgtgtcttgcctgccaactcgatggccgagagccgtgaaggggactttggctgcacagtaatggaactgaggaagctcatggagctgcgttcgagggatgcactgacccagattaatgtccactatggaggtgtacagaatctctgcagtagactgaaaacctcccctgtggaaggtctgtctgggaaccctgcagatctggagaaacgtaggcaggtgtttggacacaacgtgatcccccccaaaaagcccaagactttcttagaattagtgtgggaagctcttcaagatgtcacgcttatcatcctggagattgcagccatcatctccctggtcctgtccttttatcgccctgctggtgaagaaaatgaactgtgtggtcaagtcgcaactaccccagaagatgaaaatgaggcacaagctggctggattgagggggcagccatccttttctcagtgatcatcgtggtgttagtgactgcctttaatgattggagcaaagagaagcaattccgggggctgcagtgccgcattgaacaggagcaaaagttctccatcatccgaaacggtcaactcatccagctccctgtggctgagattgtggttggtgatattgcccaagtcaaatacggtgatctgctgcctgcagatggaatcctgatccaagggaatgatctgaagattgatgagagctctctgacaggggaatctgaccatgtcaagaagtccctggacaaagaccccatgttgctctcagggacccatgtcatggaaggttctggccggatggtggtgacagctgttggtgtcaactctcagactggaatcatccttactctcttgggggtcaatgaggatgacgaaggggagaaaaagaagaaaggtaaaaaacaaggagtccctgaaaatcgcaacaaagcaaagacccaagacggagtggccctggaaatccagccactcaacagccaggagggaatcgacaatgaggaaaaggacaagaaggcagtcaaggtgcctaaaaaggagaagtcagtgctgcagggcaagctgactcgcctggctgttcagattgggaaagccggtctgctcatgtctgctctcacggttttcatcctgattctatactttgtgattgacaactttgtgataaatcgcagaccatggctccctgagtgtactcccatctacatccagtactttgtcaagttcttcatcatcggcatcactgtactggtggtggctgtgccagaggggctgcctctggctgtcaccatctcactggcctactctgtgaagaaaatgatgaaagacaataacctagtacggcacttggatgcttgtgagaccatgggcaacgccaccgccatctgctctgataagacaggcacgttgaccatgaaccgcatgactgtggtacaagcttatattgggggcatccattaccgtcaaatcccaagccctgatgtcttcctgcccaaagtcctggacctcattgtcaatggcatttctatcaacagtgcttatacctccaagattctgcctccagagaaggagggaggcctgcctcggcaggtgggcaacaagaccgagtgtgctctgctaggctttgtcacagatctgaagcaggattatcaggctgtgcgtaatgaagtgcccgaggagaagctctacaaggtgtacacctttaactcagtgcgcaagtcaatgagcaccgtcatcaggaatcccaacggtggcttccgtatgtacagcaagggcgcctctgagatcatcttgcgcaagtgtaatcgaatcctggaccggaaaggggaagcagtgccattcaagaataaagacagagatgatatggtacgcactgtcatcgagcccatggcctgtgatggactccggactatctgcatagcttaccgggacttcgatgacacagagccctcttgggacaatgagaatgagatcctcaccgaactgacctgtatcgcggtggtgggcattgaggaccctgtgcgcccagaggtgccagatgctattgccaaatgcaaacaagctggcattactgtcagaatggtgacaggtgacaacatcaacacagcccgggccattgccaccaaatgtggcattctgacacctggggatgacttcctgtgcttagaaggcaaagaattcaaccggctcatccgcaacgagaaaggcgaggtagagcaagaaaagctggacaagatctggcctaagcttcgggtcctggcgcgatcttctcccactgacaagcacaccctggtgaaaggcataattgacagcactgttggggaacaccggcaggtcgtggctgtcactggtgatggcacaaatgacgggcctgctctgaagaaagcggatgttggttttgccatgggcatcgcaggcacagatgtagcaaaggaggcttcagacatcatcctaacagatgacaacttcaccagcattgtgaaggcagtgatgtggggacgaaatgtctatgacagcatctccaagttcctgcagttccagctcactgtcaatgtggtggccgtgattgtagccttcactggagcctgtatcactcaggattccccattgaaagctgtgcagatgttgtgggttaatctgatcatggacacttttgcttcattggccctggccacagagccccctacggaatctctgttgaagcggcgcccctatggccgaaataagcctctgatctcacgcactatgatgaagaacatcttgggccatgcattctatcagctcattgtcatctttatccttgtctttgcgggtgagaaattctttgatattgatagtgggaggaaggcacctctacattcaccacccagccagcactataccattgtttttaacaccttcgtgctgatgcagctcttcaatgaaatcaactcccgaaagatccatggagagaagaacgtcttttcaggcatctaccgcaacattatcttctgctctgtagtcttgggcacattcatctgccagattttcatcgtggaatttgggggtaaacccttcagttgtacaagcctcagcctgtctcagtggctgtggtgtctcttcattgggattggagaacttctgtggggccagttcatctccgcaatacctacccgatccctgaagttcctgaaggaggctgggcatggcaccaccaaagaggagatcaccaaggatgccgagggactggatgagattgaccatgctgagatggagctgcgccgaggccagatcctctggttccggggcctgaaccgtatccagactcagatcaaagtggtcaaagcgttccatagttccctccacgaaagcattcagaaaccctacaaccaaaagtccatccacagcttcatgacccaccctgaattcgccatagaggaggagttgccacgaacaccactcctggatgaggaagaggaggaaaatcctgacaaggcttctaagtttgggactagggtgctcctgttggatggtgaggtcactccatatgccaatacaaacaacaatgcggtggattgcaaccaagtgcagctcccccagtcggacagctctctacagagcctagagacatcagtttgaattttctttctctgactctcatccctattttacctatttccattttcgtctatcccatctatgaggtgatgatgggacttttcattgtcacgtcagctgctgtgttaacagcagtgtgtgtgaagtgaacctctacctgaccatgaagaggcaagagcacagacttacaaggatttcaacttaagcttgacttggggtttgtagcgggacccagtcaaaccccattcaggtcatggtagaatctactccttggtagtcacttgtcatttttaaagaaatgatgacaatcctcttggcatcaccccaccccacattctccccgatgttcctctcctgaattctggattttgtcctacaagtctgtgccatttataagctaagttgagggttcagagggagacaaatatccccgattgtttttcaatttttcccactttgaaaacttacacctaaaggcctgtaggcctctaactctttctgccctttcattcaaacc

SEQ ID NO: 56 - protein, 1197 aa, Homo sapiens
MTNPSDRVLPANSMAESREGDFGCTVMELRKLMELRSRDALTQINVHYGGVQNLCSRLKTSPVEGLSGNPADLEKRRQVFGHNVIPPKKPKTFLELVWEALQDVTLIIIAAIISLVLSFYRPAGEENELCGQVATTPEDENEAQAGWIEGAAILFSVIIVVLVTAFNDWSKEKQFRGLQCRIEQEQKFSIIRNGQLIQLPVAEIVVGDIAQVKYGDLLPADGILIQGNDLKIDESSLTGESDHVKKSLDKDPMLLSGTHVMEGSGRMVVTAVGVNSQTGIILTLLGVNEDDEGEKKKKGKKQGVPENRNKAKTQDGVEIQPLNSQEGIDNEEKDKKAVKVPKKEKSVLQGKLTRLAVQIGKAGLLMSALTVFILILYFVIDNFVINRRPWLPECTPIYIQYFVKFFIIGITVLVVAVPEGLPLAVTISLAYSVKKMMKDNNLVRHLDACETMGNATAICSDKTGTLTMNRMTVVQAYIGGIHYRQIPSPDVFLPKVLDLIVNGISINSAYTSKILPPEKEGGLPRQVGNKTECALLGFVTDLKQDYQAVRNEVPEEKLYKVYTFNSVRKSMSTVIRNPNGGFRMYSKGASEIILRKCNRILDRKGEAVPFKNKDRDDMVRTVIEPMACDGLRTICIAYRDFDDTEPSWDNENEILTELTCIAVVGIEDPVRPEVPDAIAKCKQAGITVRMVTGDNINTARAIATKCGILTPGDDFLCLEGKEFNRLIRNEKGEVEQEKLDKIWPKLRVLARSSPTDKHTLVKGIIDSTVGEHRQVVAVTGDGTNDGPALKKADVGFAMGIAGTDVAKEASDIILTDDNFTSIVKAVMWGRNVYDSISKFLQFQLTVNVVAVIVAFTGACITQDSPLKAVQMLWVNLIMDTFASLATEPPTESLLKRRPYGRNKPLISRTMMKNILGHAFYQLIVIFILVFAGEKFFDIDSGRKAPLHSPPSQHYTIVFNTFVLMQLFNEINSRKIHGEKNVFSGIYRNIIFCSVVLGTFICQIFIVEFGGKPFSCTSLSLSQWLWCLFIGIGELLWGQFISAIPTRSLKFLKEAGHGTTKEEITKDAEGLDEIDHAEMELRRGQILWFRQRIQTQIKVVKAFHSSLHESIQKPYNQKSIHSFMTHPEFAIEEELPRTPLLDEEEEENPDKASKFGTRVLLLDGEVTPYANTNNNAVDCNQVQLPQSDSSLQSLETSV

SEQ ID NO: 57 - DNA, 4280 bp, Homo sapiens
gcttagactgggtacctcttgcccttgcagatgctggatacttatggctgctctaatggtttctttttgtctatctttgaacctttattccagagatccagttgtcatcggtatccaggaagctctcctcttcctcctcctgacgtctactactacagttgctggttgttgctaaggttgctgccatggtaacatgcacatcctgtttacaccttcatctgggcaagttggtctaagctaggaacctacctaccctggacaactactatcatcaccacctggggacaccaatcatcgtgacacggagtccaccttccactcagttcccccatcctcttcctcctctcgctgccagacttcatacggaagaaaggatctagacttcggacggctactcgggagcttattgcacaagatatattcaatctattccctcactgggcccccagagaagcaagaagtaggaagaagttgagacagggaggcaggagacactggtcagttgaagggaaacgctacatcttctctggttgaggggcttggtaacagcaggcaaaatgacgaacccatcagaccgtgtcttgcctgccaactcgatggccgagagccgtgaaggggactttggctgcacagtaatggaactgaggaagctcatggagctgcgttcgagggatgcactgacccagattaatgtccactatggaggtgtacagaatctctgcagtagactgaaaacctcccctgtggaaggtctgtctgggaaccctgcagatctggagaaacgtaggcaggtgtttggacacaacgtgatcccccccaaaaagcccaagactttcttagaattagtgtgggaagctcttcaagatgtcacgcttatcatcctggagattgcagccatcatctccctggtcctgtccttttatcgccctgctggtgaagaaaatgaactgtgtggtcaagtcgcaactaccccagaagatgaaaatgaggcacaagctggctggattgagggggcagccatccttttctcagtgatcatcgtggtgttagtgactgcctttaatgattggagcaaagagaagcaattccgggggctgcagtgccgcattgaacaggagcaaaagttctccatcatccgaaacggtcaactcatccagctccctgtggctgagattgtggttggtgatattgcccaagtcaaatacggtgatctgctgcctgcagatggaatcctgatccaagggaatgatctgaagattgatgagagctctctgacaggggaatctgaccatgtcaagaagtccctggacaaagaccccatgttgctctcagggacccatgtcatggaaggttctggccggatggtggtgacagctgttggtgtcaactctcagactggaatcatccttactctcttgggggtcaatgaggatgacgaaggggagaaaaagaagaaaggtaaaaaacaaggagtccctgaaaatcgcaacaaagcaaagacccaagacggagtggccctggaaatccagccactcaacagccaggagggaatcgacaatgaggaaaaggacaagaaggcagtcaaggtgcctaaaaaggagaagtcagtgctgcagggcaagctgactcgcctggctgttcagattgggaaagccggtctgctcatgtctgctctcacggttttcatcctgattctatactttgtgattgacaactttgtgataaatcgcagaccatggctccctgagtgtactcccatctacatccagtactttgtcaagttcttcatcatcggcatcactgtactggtggtggctgtgccagaggggctgcctctggctgtcaccatctcactggcctactctgtgaagaaaatgatgaaagacaataacctagtacggcacttggatgcttgtgagaccatgggcaacgccaccgccatctgctctgataagacaggcacgttgaccatgaaccgcatgactgtggtacaagcttatattgggggcatccattaccgtcaaatcccaagccctgatgtcttcctgcccaaagtcctggacctcattgtcaatggcatttctatcaacagtgcttatacctccaagattctgcctccagagaaggagggaggcctgcctcggcaggtgggcaacaagaccgagtgtgctctgctaggctttgtcacagatctgaagcaggattatcaggctgtgcgtaatgaagtgcccgaggagaagctctacaaggtgtacacctttaactcagtgcgcaagtcaatgagcaccgtcatcaggaatcccaacggtggcttccgtatgtacagcaagggcgcctctgagatcatcttgcgcaagtgtaatcgaatcctggaccggaaaggggaagcagtgccattcaagaataaagacagagatgatatggtacgcactgtcatcgagcccatggcctgtgatggactccggactatctgcatagcttaccgggacttcgatgacacagagccctcttgggacaatgagaatgagatcctcaccgaactgacctgtatcgcggtggtgggcattgaggaccctgtgcgcccagaggtgccagatgctattgccaaatgcaaacaagctggcattactgtcagaatggtgacaggtgacaacatcaacacagcccgggccattgccaccaaatgtggcattctgacacctggggatgacttcctgtgcttagaaggcaaagaattcaaccggctcatccgcaacgagaaaggcgaggtagagcaagaaaagctggacaagatctggcctaagcttcgggtcctggcgcgatcttctcccactgacaagcacaccctggtgaaaggcataattgacagcactgttggggaacaccggcaggtcgtggctgtcactggtgatggcacaaatgacgggcctgctctgaagaaagcggatgttggttttgccatgggcatcgcaggcacagatgtagcaaaggaggcttcagacatcatcctaacagatgacaacttcaccagcattgtgaaggcagtgatgtggggacgaaatgtctatgacagcatctccaagttcctgcagttccagctcactgtcaatgtggtggccgtgattgtagccttcactggagcctgtatcactcaggattccccattgaaagctgtgcagatgttgtgggttaatctgatcatggacacttttgcttcattggccctggccacagagccccctacggaatctctgttgaagcggcgcccctatggccgaaataagcctctgatctcacgcactatgatgaagaacatcttgggccatgcattctatcagctcattgtcatctttatccttgtctttgcgggtgagaaattctttgatattgatagtgggaggaaggcacctctacattcaccacccagccagcactataccattgtttttaacaccttcgtgctgatgcagctcttcaatgaaatcaactcccgaaagatccatggagagaagaacgtcttttcaggcatctaccgcaacattatcttctgctctgtagtcttgggcacattcatctgccagattttcatcgtggaatttgggggtaaacccttcagttgtacaagcctcagcctgtctcagtggctgtggtgtctcttcattgggattggagaacttctgtggggccagttcatctccgcaatacctacccgatccctgaagttcctgaaggaggctgggcatggcaccaccaaagaggagatcaccaaggatgccgagggactggatgagattgaccatgctgagatggagctgcgccgaggccagatcctctggttccggggcctgaaccgtatccagactcagatcgacgtaattaacacattccagacgggagcctcttttaagggagtcctaaggcgacagaacatgggtcaacaccttgatgtaaaacttgttcctagttcatcctatatcaaagtggtcaaagcgttccatagttccctccacgaaagcattcagaaaccctacaaccaaaagtccatccacagcttcatgacccaccctgaattcgccatagaggaggagttgccacgaacaccactcctggatgaggaagaggaggaaaatcctgacaaggcttctaagtttgggactagggtgctcctgttggatggtgaggtcactccatatgccaatacaaacaacaatgcggtggattgcaaccaagtgcagctcccccagtcggacagctctctacagagcctagagacatcagtt

SEQ ID NO: 58 - protein, 1233 aa, Homo sapiens
MTNPSDRVLPANSMAESREGDFGCTVMELRKLMELRSRDALTQINVHYGGVQNLCSRLKTSPVEGLSGNPADLEKRRQVFGHNVIPPKKPKTFLELVWEALQDVTLIIIAAIISLVLSFYRPAGEENELCGQVATTPEDENEAQAGWIEGAAILFSVIIVVLVTAFNDWSKEKQFRGLQCRIEQEQKFSIIRNGQLIQLPVAEIVVGDIAQVKYGDLLPADGILIQGNDLKIDESSLTGESDHVKKSLDKDPMLLSGTHVMEGSGRMVVTAVGVNSQTGIILTLLGVNEDDEGEKKKKGKKQGVPENRNKAKTQDGVEIQPLNSQEGIDNEEKDKKAVKVPKKEKSVLQGKLTRLAVQIGKAGLLMSALTVFILILYFVIDNFVINRRPWLPECTPIYIQYFVKFFIIGITVLVVAVPEGLPLAVTISLAYSVKKMMKDNNLVRHLDACETMGNATAICSDKTGTLTMNRMTVVQAYIGGIHYRQIPSPDVFLPKVLDLIVNGISINSAYTSKILPPEKEGGLPRQVGNKTECALLGFVTDLKQDYQAVRNEVPEEKLYKVYTFNSVRKSMSTVIRNPNGGFRMYSKGASEIILRKCNRILDRKGEAVPFKNKDRDDMVRTVIEPMACDGLRTICIAYRDFDDTEPSWDNENEILTELTCIAVVGIEDPVRPEVPDAIAKCKQAGITVRMVTGDNINTARAIATKCGILTPGDDFLCLEGKEFNRLIRNEKGEVEQEKLDKIWPKLRVLARSSPTDKHTLVKGIIDSTVGEHRQVVAVTGDGTNDGPALKKADVGFAMGIAGTDVAKEASDIILTDDNFTSIVKAVMWGRNVYDSISKFLQFQLTVNVVAVIVAFTGACITQDSPLKAVQMLWVNLIMDTFASLATEPPTESLLKRRPYGRNKPLISRTMMKNILGHAFYQLIVIFILVFAGEKFFDIDSGRKAPLHSPPSQHYTIVFNTFVLMQLFNEINSRKIHGEKNVFSGIYRNIIFCSVVLGTFICQIFIVEFGGKPFSCTSLSLSQWLWCLFIGIGELLWGQFISAIPTRSLKFLKEAGHGTTKEEITKDAEGLDEIDHAEMELRRGQILWFRQRIQTQIDVINTFQTGASFKGVLRRQNMGQHLDVKLVPSSSYIKVVKAFHSSLHESIQKPYNQKSIHSFMTHPEFAIEEELPRTPLLDEEEEENPDKASKFGTRVLLLDGEVTPYANTNNNAVDCNQVQLPQSDSSLQSLETSV

SEQ ID NO: 59 - DNA, 709 bp, Homo sapiens
cgcaacattatcttctgctctgtagtcttgggcacattcatctgccagttcatctccgcaatacctacccgatccctgaagttcctgaaggaggctgggcatggcaccaccaaagaggagatcaccaaggatgccgagggactggatgagattgaccatgctgagatggagctgcgccgaggccagatcctctggttccggggcctgaaccgtatccagactcagatcgacgtaattaacacattccagacgggagcctcttttaagggagtcctaaggcgacagaacatgggtcaacaccttgatgtaaaacttgttcctagttcatcctatgtagcagttgcaccagtcaaatcttcccccaccacttctgttcctgctgtttcatctcctcctatgggcaatcaaagtggtcaaagcgttccatagttccctccacgaaagcattcagaaaccctacaaccaaaagtccatccacagcttcatgacccaccctgaattcgccatagaggaggagttgccacgaacaccactcctggatgaggaagaggaggaaaatcctgacaaggcttctaagtttgggactagggtgctcctgttggatggtgaggtcactccatatgccaatacaaacaacaatgcggtggattgcaaccaagtgcagctcccccagtcggacagctctctacagagcctagagacatcagtt

SEQ ID NO: 60 - protein, 85 aa, Homo sapiens
MELRRGQILWFRQRIQTQIDVINTFQTGASFKGVLRRQNMGQHLDVKLVPSSSYVAVAPVKSSPTTSVPAVSSPPMGNQSGQSVP

SEQ ID NO: 61 - DNA, 4350 bp, Homo sapiens
gcttagactgggtacctcttgcccttgcagatgctggatacttatggctgctctaatggtttctttttgtctatctttgaacctttattccagagatccagttgtcatcggtatccaggaagctctcctcttcctcctcctgacgtctactactacagttgctggttgttgctaaggttgctgccatggtaacatgcacatcctgtttacaccttcatctgggcaagttggtctaagctaggaacctacctaccctggacaactactatcatcaccacctggggacaccaatcatcgtgacacggagtccaccttccactcagttcccccatcctcttcctcctctcgctgccagacttcatacggaagaaaggatctagacttcggacggctactcgggagcttattgcacaagatatattcaatctattccctcactgggcccccagagaagcaagaagtaggaagaagttgagacagggaggcaggagacactggtcagttgaagggaaacgctacatcttctctggttgaggggcttggtaacagcaggcaaaatgacgaacccatcagaccgtgtcttgcctgccaactcgatggccgagagccgtgaaggggactttggctgcacagtaatggaactgaggaagctcatggagctgcgttcgagggatgcactgacccagattaatgtccactatggaggtgtacagaatctctgcagtagactgaaaacctcccctgtggaaggtctgtctgggaaccctgcagatctggagaaacgtaggcaggtgtttggacacaacgtgatcccccccaaaaagcccaagactttcttagaattagtgtgggaagctcttcaagatgtcacgcttatcatcctggagattgcagccatcatctccctggtcctgtccttttatcgccctgctggtgaagaaaatgaactgtgtggtcaagtcgcaactaccccagaagatgaaaatgaggcacaagctggctggattgagggggcagccatccttttctcagtgatcatcgtggtgttagtgactgcctttaatgattggagcaaagagaagcaattccgggggctgcagtgccgcattgaacaggagcaaaagttctccatcatccgaaacggtcaactcatccagctccctgtggctgagattgtggttggtgatattgcccaagtcaaatacggtgatctgctgcctgcagatggaatcctgatccaagggaatgatctgaagattgatgagagctctctgacaggggaatctgaccatgtcaagaagtccctggacaaagaccccatgttgctctcagggacccatgtcatggaaggttctggccggatggtggtgacagctgttggtgtcaactctcagactggaatcatccttactctcttgggggtcaatgaggatgacgaaggggagaaaaagaagaaaggtaaaaaacaaggagtccctgaaaatcgcaacaaagcaaagacccaagacggagtggccctggaaatccagccactcaacagccaggagggaatcgacaatgaggaaaaggacaagaaggcagtcaaggtgcctaaaaaggagaagtcagtgctgcagggcaagctgactcgcctggctgttcagattgggaaagccggtctgctcatgtctgctctcacggttttcatcctgattctatactttgtgattgacaactttgtgataaatcgcagaccatggctccctgagtgtactcccatctacatccagtactttgtcaagttcttcatcatcggcatcactgtactggtggtggctgtgccagaggggctgcctctggctgtcaccatctcactggcctactctgtgaagaaaatgatgaaagacaataacctagtacggcacttggatgcttgtgagaccatgggcaacgccaccgccatctgctctgataagacaggcacgttgaccatgaaccgcatgactgtggtacaagcttatattgggggcatccattaccgtcaaatcccaagccctgatgtcttcctgcccaaagtcctggacctcattgtcaatggcatttctatcaacagtgcttatacctccaagattctgcctccagagaaggagggaggcctgcctcggcaggtgggcaacaagaccgagtgtgctctgctaggctttgtcacagatctgaagcaggattatcaggctgtgcgtaatgaagtgcccgaggagaagctctacaaggtgtacacctttaactcagtgcgcaagtcaatgagcaccgtcatcaggaatcccaacggtggcttccgtatgtacagcaagggcgcctctgagatcatcttgcgcaagtgtaatcgaatcctggaccggaaaggggaagcagtgccattcaagaataaagacagagatgatatggtacgcactgtcatcgagcccatggcctgtgatggactccggactatctgcatagcttaccgggacttcgatgacacagagccctcttgggacaatgagaatgagatcctcaccgaactgacctgtatcgcggtggtgggcattgaggaccctgtgcgcccagaggtgccagatgctattgccaaatgcaaacaagctggcattactgtcagaatggtgacaggtgacaacatcaacacagcccgggccattgccaccaaatgtggcattctgacacctggggatgacttcctgtgcttagaaggcaaagaattcaaccggctcatccgcaacgagaaaggcgaggtagagcaagaaaagctggacaagatctggcctaagcttcgggtcctggcgcgatcttctcccactgacaagcacaccctggtgaaaggcataattgacagcactgttggggaacaccggcaggtcgtggctgtcactggtgatggcacaaatgacgggcctgctctgaagaaagcggatgttggttttgccatgggcatcgcaggcacagatgtagcaaaggaggcttcagacatcatcctaacagatgacaacttcaccagcattgtgaaggcagtgatgtggggacgaaatgtctatgacagcatctccaagttcctgcagttccagctcactgtcaatgtggtggccgtgattgtagccttcactggagcctgtatcactcaggattccccattgaaagctgtgcagatgttgtgggttaatctgatcatggacacttttgcttcattggccctggccacagagccccctacggaatctctgttgaagcggcgcccctatggccgaaataagcctctgatctcacgcactatgatgaagaacatcttgggccatgcattctatcagctcattgtcatctttatccttgtctttgcgggtgagaaattctttgatattgatagtgggaggaaggcacctctacattcaccacccagccagcactataccattgtttttaacaccttcgtgctgatgcagctcttcaatgaaatcaactcccgaaagatccatggagagaagaacgtcttttcaggcatctaccgcaacattatcttctgctctgtagtcttgggcacattcatctgccagattttcatcgtggaatttgggggtaaacccttcagttgtacaagcctcagcctgtctcagtggctgtggtgtctcttcattgggattggagaacttctgtggggccagttcatctccgcaatacctacccgatccctgaagttcctgaaggaggctgggcatggcaccaccaaagaggagatcaccaaggatgccgagggactggatgagattgaccatgctgagatggagctgcgccgaggccagatcctctggttccggggcctgaaccgtatccagactcagatcgacgtaattaacacattccagacgggagcctcttttaagggagtcctaaggcgacagaacatgggtcaacaccttgatgtaaaacttgttcctagttcatcctatgtagcagttgcaccagtcaaatcttcccccaccacttctgttcctgctgtttcatctcctcctatgggcaatcaaagtggtcaaagcgttccatagttccctccacgaaagcattcagaaaccctacaaccaaaagtccatccacagcttcatgacccaccctgaattcgccatagaggaggagttgccacgaacaccactcctggatgaggaagaggaggaaaatcctgacaaggcttctaagtttgggactagggtgctcctgttggatggtgaggtcactccatatgccaatacaaacaacaatgcggtggattgcaaccaagtgcagctcccccagtcggacagctctctacagagcctagagacatcagtt

SEQ ID NO: 62 - protein, 1162 aa, Homo sapiens
MTNPSDRVLPANSMAESREGDFGCTVMELRKLMELRSRDALTQINVHYGGVQNLCSRLKTSPVEGLSGNPADLEKRRQVFGHNVIPPKKPKTFLELVWEALQDVTLIIIAAIISLVLSFYRPAGEENELCGQVATTPEDENEAQAGWIEGAAILFSVIIVVLVTAFNDWSKEKQFRGLQCRIEQEQKFSIIRNGQLIQLPVAEIVVGDIAQVKYGDLLPADGILIQGNDLKIDESSLTGESDHVKKSLDKDPMLLSGTHVMEGSGRMVVTAVGVNSQTGIILTLLGVNEDDEGEKKKKGKKQGVPENRNKAKTQDGVEIQPLNSQEGIDNEEKDKKAVKVPKKEKSVLQGKLTRLAVQIGKAGLLMSALTVFILILYFVIDNFVINRRPWLPECTPIYIQYFVKFFIIGITVLVVAVPEGLPLAVTISLAYSVKKMMKDNNLVRHLDACETMGNATAICSDKTGTLTMNRMTVVQAYIGGIHYRQIPSPDVFLPKVLDLIVNGISINSAYTSKILPPEKEGGLPRQVGNKTECALLGFVTDLKQDYQAVRNEVPEEKLYKVYTFNSVRKSMSTVIRNPNGGFRMYSKGASEIILRKCNRILDRKGEAVPFKNKDRDDMVRTVIEPMACDGLRTICIAYRDFDDTEPSWDNENEILTELTCIAVVGIEDPVRPEVPDAIAKCKQAGITVRMVTGDNINTARAIATKCGILTPGDDFLCLEGKEFNRLIRNEKGEVEQEKLDKIWPKLRVLARSSPTDKHTLVKGIIDSTVGEHRQVVAVTGDGTNDGPALKKADVGFAMGIAGTDVAKEASDIILTDDNFTSIVKAVMWGRNVYDSISKFLQFQLTVNVVAVIVAFTGACITQDSPLKAVQMLWVNLIMDTFASLATEPPTESLLKRRPYGRNKPLISRTMMKNILGHAFYQLIVIFILVFAGEKFFDIDSGRKAPLHSPPSQHYTIVFNTFVLMQLFNEINSRKIHGEKNVFSGIYRNIIFCSVVLGTFICQIFIVEFGGKPFSCTSLSLSQWLWCLFIGIGELLWGQFISAIPTRSLKFLKEAGHGTTKEEITKDAEGLDEIDHAEMELRRGQILWFRQRIQTQIDVINTFQTGASFKGVLRRQNMGQHLDVKLVPSSSYVAVAPVKSSPTTSVPAVSSPPMGNQSGQSVP

SEQ ID NO: 63 - DNA, 4639 bp, Homo sapiens
gcttagactgggtacctcttgcccttgcagatgctggatacttatggctgctctaatggtttctttttgtctatctttgaacctttattccagagatccagttgtcatcggtatccaggaagctctcctcttcctcctcctgacgtctactactacagttgctggttgttgctaaggttgctgccatggtaacatgcacatcctgtttacaccttcatctgggcaagttggtctaagctaggaacctacctaccctggacaactactatcatcaccacctggggacaccaatcatcgtgacacggagtccaccttccactcagttcccccatcctcttcctcctctcgctgccagacttcatacggaagaaaggatctagacttcggacggctactcgggagcttattgcacaagatatattcaatctattccctcactgggcccccagagaagcaagaagtaggaagaagttgagacagggaggcaggagacactggtcagttgaagggaaacgctacatcttctctggttgaggggcttggtaacagcaggcaaaatgacgaacccatcagaccgtgtcttgcctgccaactcgatggccgagagccgtgaaggggactttggctgcacagtaatggaactgaggaagctcatggagctgcgttcgagggatgcactgacccagattaatgtccactatggaggtgtacagaatctctgcagtagactgaaaacctcccctgtggaaggtctgtctgggaaccctgcagatctggagaaacgtaggcaggtgtttggacacaacgtgatcccccccaaaaagcccaagactttcttagaattagtgtgggaagctcttcaagatgtcacgcttatcatcctggagattgcagccatcatctccctggtcctgtccttttatcgccctgctggtgaagaaaatgaactgtgtggtcaagtcgcaactaccccagaagatgaaaatgaggcacaagctggctggattgagggggcagccatccttttctcagtgatcatcgtggtgttagtgactgcctttaatgattggagcaaagagaagcaattccgggggctgcagtgccgcattgaacaggagcaaaagttctccatcatccgaaacggtcaactcatccagctccctgtggctgagattgtggttggtgatattgcccaagtcaaatacggtgatctgctgcctgcagatggaatcctgatccaagggaatgatctgaagattgatgagagctctctgacaggggaatctgaccatgtcaagaagtccctggacaaagaccccatgttgctctcagggacccatgtcatggaaggttctggccggatggtggtgacagctgttggtgtcaactctcagactggaatcatccttactctcttgggggtcaatgaggatgacgaaggggagaaaaagaagaaaggtaaaaaacaaggagtccctgaaaatcgcaacaaagcaaagacccaagacggagtggccctggaaatccagccactcaacagccaggagggaatcgacaatgaggaaaaggacaagaaggcagtcaaggtgcctaaaaaggagaagtcagtgctgcagggcaagctgactcgcctggctgttcagattgggaaagccggtctgctcatgtctgctctcacggttttcatcctgattctatactttgtgattgacaactttgtgataaatcgcagaccatggctccctgagtgtactcccatctacatccagtactttgtcaagttcttcatcatcggcatcactgtactggtggtggctgtgccagaggggctgcctctggctgtcaccatctcactggcctactctgtgaagaaaatgatgaaagacaataacctagtacggcacttggatgcttgtgagaccatgggcaacgccaccgccatctgctctgataagacaggcacgttgaccatgaaccgcatgactgtggtacaagcttatattgggggcatccattaccgtcaaatcccaagccctgatgtcttcctgcccaaagtcctggacctcattgtcaatggcatttctatcaacagtgcttatacctccaagattctgcctccagagaaggagggaggcctgcctcggcaggtgggcaacaagaccgagtgtgctctgctaggctttgtcacagatctgaagcaggattatcaggctgtgcgtaatgaagtgcccgaggagaagctctacaaggtgtacacctttaactcagtgcgcaagtcaatgagcaccgtcatcaggaatcccaacggtggcttccgtatgtacagcaagggcgcctctgagatcatcttgcgcaagtgtaatcgaatcctggaccggaaaggggaagcagtgccattcaagaataaagacagagatgatatggtacgcactgtcatcgagcccatggcctgtgatggactccggactatctgcatagcttaccgggacttcgatgacacagagccctcttgggacaatgagaatgagatcctcaccgaactgacctgtatcgcggtggtgggcattgaggaccctgtgcgcccagaggtgccagatgctattgccaaatgcaaacaagctggcattactgtcagaatggtgacaggtgacaacatcaacacagcccgggccattgccaccaaatgtggcattctgacacctggggatgacttcctgtgcttagaaggcaaagaattcaaccggctcatccgcaacgagaaaggcgaggtagagcaagaaaagctggacaagatctggcctaagcttcgggtcctggcgcgatcttctcccactgacaagcacaccctggtgaaaggcataattgacagcactgttggggaacaccggcaggtcgtggctgtcactggtgatggcacaaatgacgggcctgctctgaagaaagcggatgttggttttgccatgggcatcgcaggcacagatgtagcaaaggaggcttcagacatcatcctaacagatgacaacttcaccagcattgtgaaggcagtgatgtggggacgaaatgtctatgacagcatctccaagttcctgcagttccagctcactgtcaatgtggtggccgtgattgtagccttcactggagcctgtatcactcaggattccccattgaaagctgtgcagatgttgtgggttaatctgatcatggacacttttgcttcattggccctggccacagagccccctacggaatctctgttgaagcggcgcccctatggccgaaataagcctctgatctcacgcactatgatgaagaacatcttgggccatgcattctatcagctcattgtcatctttatccttgtctttgcgggtgagaaattctttgatattgatagtgggaggaaggcacctctacattcaccacccagccagcactataccattgtttttaacaccttcgtgctgatgcagctcttcaatgaaatcaactcccgaaagatccatggagagaagaacgtcttttcaggcatctaccgcaacattatcttctgctctgtagtcttgggcacattcatctgccagattttcatcgtggaatttgggggtaaacccttcagttgtacaagcctcagcctgtctcagtggctgtggtgtctcttcattgggattggagaacttctgtggggccagttcatctccgcaatacctacccgatccctgaagttcctgaaggaggctgggcatggcaccaccaaagaggagatcaccaaggatgccgagggactggatgagattgaccatgctgagatggagctgcgccgaggccagatcctctggttccggggcctgaaccgtatccagactcagatcaaagtggtcaaagcgttccatagttccctccacgaaagcattcagaaaccctacaaccaaaagtccatccacagcttcatgacccaccctgaattcgccatagaggaggagttgccacgaacaccactcctggatgaggaagaggaggaaaatcctgacaaggcttctaagtttgggactagggtgctcctgttggatggtgaggtcactccatatgccaatacaaacaacaatgcggtggattgcaaccaagtgcagctcccccagtcggacagctctctacagagcctagagacatcagtttgaattttctttctctgactctcatccctattttacctatttccattttcgtctatcccatctatgaggtgatgatgggacttttcattgtcacgtcagctgctgtgttaacagcagtgtgtgtgaagtgaacctctacctgaccatgaagaggcaagagcacagacttacaaggatttcaacttaagcttgacttggggtttgtagcgggacccagtcaaaccccattcaggtcatggtagaatctactccttggtagtcacttgtcatttttaaagaaatgatgacaatcctcttggcatcaccccaccccacattctccccgatgttcctctcctgaattctggattttgtcctacaagtctgtgccatttataagctaagttgagggttcagagggagacaaatatccccaagtgaaatatgttgcggtagagatggaatgtataaaatccgccagtagtgtg

SEQ ID NO: 64 - protein, 1197 aa, Homo sapiens; identical to SEQ ID NO: 56

SEQ ID NO: 65 - DNA, 18788 bp, Mus musculus
ggttgatgatgctcctgttacctctgctcgctgtattcttggtgaagcgaagccatactcgtaagtatcctgagtgctctttgcttccaaatgcaatgctgaagcataacgacggctttgctttctaaacttgtggtgcaaactataaaaaagccagagacaaacccacaggtcctttgtacccaagacttgaagggtgatggaccaactggcctgctgttcagatgtgtgtgcatggatgccagcctgcccagaaagactgcctcacttttcctctgagagctatgtccccacttttctgctatacccttactttcccttctgtttctcttcttttcttttctaacaatgaacctgcgtgtagggagagtttcaggggagttgaaccacccaatctgtccatcgttcaggccaatagataatttttcctcctcaggacaaggacatcctgtaacaaaagatgcatgaaagataaagccatggctctgagctcgtttactaggtgtaggaaatattcatggatttaaaacaaagttctggggctggagagatgtctcagcggttaagagcaatggctgttcttccagagtgcaccagttcaattcctggaacccacggggcagctcacaactgtctgtaattccagttccaggggatctgacatcttcacatagacatccatgcaggcaaaacaccagagtacgtaaaaataagtgaaaattagaataaacatcgtagtttagggagcttgtgtctctaagggatcaagagccctgtgttgccaccaacacaggagagtccgtgtgacaggaagtgctagccttctctaccctaagcaactgctttccagctggctgttagtgcttttaaaggttcacaggagaattgcagaactccgatcaggccacccaagctgctgactaatgttcatgccaggaaggaactctttcaaatcgtgtctgtgttagttctacaagtattgattgatagcttgctacgtgtcagctgattggaggaatgtaacaactggatatggatatggtgatgcaaacttacagtcctagctactctaaaggcttaggggggaatggtgagtttgaggccagtttgagtgtcgaaagaaagaaagagatcgagaaagagaggaagggaaggagggagggagggaaggagggagggagggaggaagggaggaaggaaggaaggaaggaaggaaggaaggaaggaaggaaggaaggaaggaaggaaggaaggaaggaaggaaggaagagagaacaataaagatcaggttagatgtttctctggcttacggagattgcagaaccctctggcacagtgatcacaagtgaacacaggtcttctgcctttagcccaggcctttctgtgatactgctgaacttccgagtaccccgtacatagataatttgtgggtagttataggatggggtgctgcactatgctggttgttttcctctgactcttagatgtgttcctgctgtgttgctttgtgttctagaagccgagggctacagactgcatcacccagtcctagcttctgtgttggttcacttggtaggaaatgctaggaaaagagaagagaacaaggagaaaagagagattgaagtttgcttttcttgcctccttccttctttctagaagtctctggcagtagctatctgtagctctctgcagtgtaggttgtttttccttttgtctgaaaatccctcttctttagagttttagcttccgctgggctttagcaattcttattagctgcccatttccctgtaatcttaggggtgaacatggtttattatagttacttccttatggtctctccatgggacctttttggtaagggttgtttcctcccatggttctcactaaatgaactttgaggaaaatgacagggaagggatttcagatttatgggaaataactaaaggcctacatgatgtttgtctccagtgttacccataaatagatacttttgcaccataggtggatagcagacacggggaagagaaaccagagtgtttgagacgtaactccaggaaatgttaagataattctcacattacgtccagcacgtcgctctcagcagcagcatagcccacgggtgattgtgtctgttccttcctttgagttcccacgtttcctcttcatggtttctcatttcccaaaatcttcccttagctgctcttttcactggtgggaagagacagctccattttcctcttggttttgtgaccttgttcccaacagacacttcaatgcttcctaaaagactttatgtgtcaaagtaatgttcctaagacattgaagtcacctgactaggaagtatagcaagcttggacaacaataatgaattcaaatgtcaaactctgatctactgtagttgcagaactgatgtaaaaattggtgctttgtgctccttgctcttcatttcagctggtgtgaagctgaagtgatgctgcatgtctctgtaacatgggacatcctacatgagatttcccttgcatagctctatatactttgtgtgtttcatcttgatatagttaaagttagtctcttgatgttattcataatttaatagatgagtcagcccgctacatcaatctactttatgaatgatgcttcagagattaggactgatcatggacaaaccagttgtgttagtgttagaagatgtacttgtagattatctgcttagaaataaccttgagccaagccagggtggtacaagcctttaatcccagcacttgggaggcagaggccggctaatttctgagttcgacaccaccctggtctacagagtgggttccaggacatctagagctgcacagagaaaccttgtctcaaaaataaaacaaaccaaagagcggggtggggggtggggtggagggagaggagaggagtagggaggggtaaggggagagggagggagggagggacggagggagggagggagggggagagagagagagagagaaccttgagttcaaagagttggcatgagaaaatagggcaattagatttcagtctgtttccatgttgctgttaggttcatggaaaagaaatttctccaagacaatatttcatccccctaaaactctctttcttcatagttgatattgaatgtatctaattctgataaatagatttttaaaaatattttatttattttatatacgtgagtacactgtagctatcttcagacacaccagaagagggtgtcagatcccattacaaatggttgtgagccaccctgtggttgctgggaattgaattgaggacctctggaaaagcagtcattgctcttaaccactgatccatctctccagcccagatttttcttttaaccagggagaacaactatctattcttgcttgaccacaatcctcttaccttagaggactgctaaaatttcaagggaagaggtctagactaaaggtcaaacacatagctctttaaatgcttttactttatgaagctctaattgacatagatactagggacatgatttctgacttttaagtttatatttttaaaaaatctcttaagaatataagtgtcaaaccacattttattacactttcaatgaattctttaaaaacaataagattcactgtgagttcaaggccagcccaatctagagagcaagttccaggacaaccagggctacacagagaaaccctgtctcaggaaaacaaaacaacaacaaagaataggattcaagaaattgagattctcctgggatatatgagatgtgcggtcattattgtactcaaggtgtagggaagggaaaaaagcacttcaggccctcattcattctccctggagccccacagtggtctccttgaggttcttccagtatgcaaagcatgcaccctcaaggatttgggctcagttatctggaagggtcttcccccatggcccctccttcactctagacacaactcaatgttacctggtcaaagaagccatttctggtctgtttaacacattggttctcttcactctctttcctttctctacttttgttttctttatttgtttgcttgttttgggggttttgttcgtttgtttgtttgtttgtgacaagaattctctgtgtagccctggctgtcctggaattcacagagatccacctgtctctgttacccaactgggattaaaggcatataccaccatgcatactagtttcttaatacaatttattatcacttgaccttgtattatatatttgtcagttgacaatattccttctagaaattatctcagaggactggtcctttatttgttccatattgtgctcctagcatctagaactatgtttactagaaattcagaaaagaataatacttatatgaagtgaagtattgataaatgttaaaggggtagccatgaaagagtaactgtaattgtttcaataggaaatagtccttacaggtatatgtgattgcgcccttggtttcagatgacggctctgttgtgatattgtgaagttttaggacacgggacttagcttgcagacttaaggctacagaggcaagaattgagaggtataagttgaccctacttctatcccaagctcagtacttcctagctgtgtagtgtgatgatagtgagctgcaagcttcttgctccccaactaagctaatcccagcttccacgccttcttcactatgagggactgtatttccttaagccattatgcaaataagtcgttcctgctttgtgctgtttctgtcaagtatcacatcagagcaatgagaaaagcaacttattgtggtcattgcaatgctaaacctgacgatgcagtctgtgggacttcagaagtgaagtgtaagagtaatataaagtttggagctgtgggctccaaatgctgtaactagaactttgtgggatgttctcgcagaggccaagagggacgttatcaggaattggactagaggctattccggcaaagaatcgatgtcccccctctgtgtcctgaaagtcaaaatgaggctgaattaaagagcaatatactaatgtgtttggtgaagaaaatctctagtcagaagtgttcagactgtggcggttactgtccctgcttttagcccatattacagcaatagacagctgaaagctgaggggaaatatttgaaaagtatatagtttggcagggaaagggacatgaatacagttgtggtcaaagcaagtgtgggaaaagctgtgataattcatacaggtattagtactattaaagaaaaatctcacatctctccagccccaagattttggatttcgatcagtgttggaacccttaagatgttagggggtagggggggctggggaaatggctcagtggttaagagcactgactgctcttccagaggtcctgagttcaattcccagcaaccacaaggtggcttacaaccatctgtaatgagatctgatgccctctgctggtgtgtctgaagacagtaacagtgtactttttttttttaatgattttcagacaagcaaaaactttaataaaatcaatctctcaaagtaaaataaataaataaataaaaagatgttagggactttcccagttgtaaaatgcaccttgtatcatgaggtagccatgggcctctggggtcagggctgtggattgaatgtgaaatgcaccccccccaggtttgtatatttacacactaggtgctcagttggtagtgtctcttgagaagttgtgtggtttggggggcacacaacacagataacaggtcttaaggttggctaagggttattatcgtccagcacaattctagcctgagccctctgctttctgacctggaaggatatgaggaaccgtagcacaagctccagcaagcccagaccaggctgatcccagccactctttcctcttctccatggactctactcctttattccatgagccaaaacaaatccttccccccttcggtttctatcatgtatttctcagtagggacaagaaaagtaattaatacagtggctaagaagtcagactggcacatttgtcagttttagacttgccgttaagagccagtctcttgacagttgttaggagaagggactaatggcttctgctgcgtgcagaaccatcgacatcactgcatgctttgaggagtgtcccaaggttcttttacctaaaatacaaccatttacttctctcctcattcccacaatccccgggatctcaaagagtagttatcagaaatcacaatcatttttaccgtactaagacactgagctgcttgaagagggtaacaataaactgttctttattgaaatggctacccaatcagaacctcctaccaacctgaggaagatctgcttgggctctagggactggaagatcaaagactgaaacatgtctgacacaagggggcaggagagagcactttaatccaggctctggaagagtctctcaagcagagttgagtagtcataggtagagaagctcccgatgtgagagttcagcttttgatttctggttccttcactgtggcttttaaggttgtgcttaatttagttaattttgagtaatgtacttaatctctctgcaccttccatctgtggaatgggaatgatgggacctaccttgatggatgttattgtgaaggctggggatgtagcccgatagataagagttcttgtctagcttgtacaaagtcctgggatcaatccctcgtgccacctgaaccagatttggtgatttgtgaggcaggagaatcagaaggtcaaggtcatggttgactacatagacagtttgaggccagcctgacatgagaccatgttttgttttgtttaattattgtgaggaatgaatgaagccaatgttgctcaagggtttgtatagcactggccacatggtccctgcacaaaaaataaatacacgtaaatagtgatgatggaggtacctgctgccctttaggcctcactgaaggtgtaactggtctggcttgatctccttggaggatttctcaggaacactcctactcctacgtgagcagggttgctgtcttgcctacaccccataggtgccttttttgtttgtttgtttttgtttttgtttttgtttttgttttttgttttgttttgttttggtttttcaagacaggatttctctgtgtagccctggctgtcctggagctcactttgtagaccaggaaggcctcaaacccagaaatccacctgcctctgcctcccaagttaaaggcgtgggccaccaccggcggactcggtgcctcttttgtgacacttgtatttgttctgttatataaaaatccccagttatactgtaaatttctggagggaagaagtggtacctgattcattttcctcttcagatgttgcatcatagcttgtccatggtagatattcaataaaaacaagtccggggttttatattccagtaattttccttagatgtttgtcaaaagtggcccaactgctattgtaccaagttaaagagacaaggctcggggtgggcgtggggctgggggtgggatgagccagcactctggtgtgagagatgcttgttgagttgaatgaactccccagaaggcctaggagatttgagtaaacagtaagtgatccttgaagagcagtgtgactggcccagctagacaaagccaaatgctaagctcatagatgtcagctccacaagtgagtcatgttggtgactcatggaaaggggccaacccaacctgacttcataatcgttggagcaagagggggagcggagcaaatggtttcgaaatcacagtctgtgtagaacaattttagtccttccaaatgattcgaccttagtagttatattaaatcttcaaatatctgggcaacacattctggtaagatacgaattgccacaaggtctggcatgctatgaaggggagtgtaacaaggacttttcttcatcttccctggtctgaattaccgacttcatatctgtcagccgacatccctggatcatgaagtgccattttagaagcctggctaagggccaggcacaacttatacctgtagaggcaccagatgggtcccacagagaatgaagagaaggctgtggtgtccttggccagcatgcacgccctctctccccttggcctgctcagctcttgaccctgagatcttctccaagatgtcaccctctctatagaacctttcctaagagcccacattgacatgatagcccatatacgctacttctaaaaccaccttcttttacctatactatgtcctgaacttcttgcactatctaggagttcatttcagtttaccttgacccttactgatgatcacaatcctcatattgatatttcaatggacgaaaaagtagaaaaatagtaagaaagtagctaccaggagtggttgggtatagcaagaaaaagcatggtgcttttgaaagtattttctgcaggaggcctgagccttaacggctgttctgactctgtttaatctgggaagaagggtgtataccccagtatatgtagctggaagatggtagaaagatggccctcaattatcaacccagaggccttattagtaaaacaaggggttggactgtcagggttttctttccctcagaggctctgggggcttcttgaggcacatctccacgcctgccccatccccacccccacccacccagtgaatagttttggttcttcccccaagaccagaacatcacactgtaagttacttacaagtggaggttacctataaagtttcttcttcagtcacacagctgaagtctttccagatcgtaattactaggattctatagttgtgttggataaaatagtggctagaacactggtgaggggaatgccagggaatgcggttattacattctgtcatctgtgactctcaacgccttccttccttgtctcctcctcagggacccactcgctgagatattttcgtctagctgtttccgatcctggtcccgtcgtccctgaatttatctctgttgggtatgtggactcacaccctatcactacatacgacagtgtcactcgacagaaggagccgaaagctccatggatggcagagaacctggcacctgatcactgggagaggtacactcagctgctaaggggctggcagcagacattcaaggcggagctgaggcacctacagaggcactacaaccactcaggtgtgactgtagcagagatgagcactctccctcactggctactccccagaagacaggccctgggctgtctacgacaatttcactagttgcttatattctttgtagaaaacttagaaaatcaggttgctggagttcagtgaccaccatctcccccatgactcttccacactgacctgtaaaaaccctttatcccttgtccccatattcctatcccattggtatccaacactcttctctaacctcattctagatttgctccccttaggactcatgtgctgatggctagtcttcatgatttgcttatttctgcatagaaacttaagattttaattgccccagatatatttctggctcctgcgtatctcttgctcctacactgcactcagaatagctatgaaatttatcaatgaatcatcccaaagataggctaattccccaaggcaagcttcatcatgatcctttggcatgcagcaggtaccccaccaatgtctgcgagtaggtgggtctgctgaacaggaaccttttggaactcaaatatacagacctgtgtggtggtgtcttctaaggcaaaagtgctttcagccatgctccagttgtaccacttgagaagtctctctctgtctctgtttaaagccatcctcccataggctgtatatgtttcagggcttcacacctaccagagaatgattggctgtgagttgctagaagatggcagcaccacagggtttctccagtatgcatatgatggacaagatttcatcatcttcaataaagacaccctctcctggttggccatggattatgtggctcacatcaccaagcaagcatgggaggccaacctgcatgagttgcaataccaaaagaactggctggaagaagaatgcattgcctggctaaagaggttcttggaatatggaagagataccctagaaagaacaggtaatgggaagagagaacacctcattcttaacatgcctaggaaaactggctttgtgtctgacttcctcttctgcaggtgatattcgccctgtgctgaaatctgtctcttgcttggactgttctgacctgtaaccccccaagagaactctcattagttatatttttagcagcatcttgacaagccttagcagttccacttgtcttgacagaatgtaacacctccaagggcacctctatcaaaaaaagtcctctcctgtcagtgagaggctggggaaagcttttggaagtggggctgttgttgcagattatttaagaagcaagggttcacagaatccctgtgtgagtgcaaagctagtcctatgaagaagagccttgggaagacaggcttttccttacttggggattaactcttctgggtatagattttatcttctgccataaatgcatgatccaactggtcaacttcagcagcatgtggaatgttgcatgttggcttggatgattcaaaatgtttcaggaaatcctgaacactgtagaccttttcccatgaaagtaatggccagtctgggggactttccagagacatagcaagccctgggttgggaggaagggtatgggctatggttataaacatgtgctgccctgctaggtggtggtggctcaagcctttagtctcagcactaaagagcaagaagcaggtagatctctgtgagttcaaggccaatctggtctacggactgagttctaggacatccagggctacacagagaaagactgtctcaaaaacaaaacaaacaaagaaaataaccatgtgttgtctgtctaaaatgtccaggctttggaggtagatggttagagcctgatattggctttctttcctactagcagaataactgccataggctcaatggttgtaattaacaaccctatttcaaacaggctcacatcctatttgaaagcaagaatcagagcagcacagagacctaagaaaccacaacccatgcttgaatgctgttctccacagtagtagagggttagctgaagctaggagcacaaatcttacatcctcatggcttctctagtccacaaaacaggctactactgtctctgagtacttgttgcctaaataaatcagaagagaactggtctgagttggttcacatgtagcctcgttagctagtcactgtgaacatcggaaaagacttcaaagattaactgtgggtaacaaaattctggcaggaattaaggtgcacacacatccaaaatggtcatgtttcagagattcacccagggctcctttacagggggtctagtgaggatacagtaaggggtggtgatgtgtctgatgaagtgcgacgtgaaaataccaccgcactagtgcgagatccgaggggcaggaagagagggcatccgctagcagagttctgcaagagttggtgggctgaaagaggatcctttcgggaggtgtggctaaagaggaatgtgcccagggcagaactgcctatgtattgagattggtacttcatcagctcactgctctctggctgaggctgtccagctggaatccaggggcagagaagcactagagttacagtgggaaagcctagacaaatcacagagggacagagactggatccaggggctacacagagacaccaacctttccgcactgactgttgtaggggaggaattagcatgagttcttcataggagcccatgttccagagggttctggtaatgtctcgaaatacgctgtcgtttggcaggagaagaagcctctcctgtcaggaaaaaatcgaagcttctggaaggccggccagcaaagccccagcctcaagtaatataatgttgccttgtctactttccagaaagtatggaagatgacgtagacgagaatactctctaagccttaggacactgctctcatattgaatgtgactgtcacctgcctgaagaatgtctaatagcctaagatctggttaaatgctattgcagatcttgactgcccttaatcactaaggatgttttaggctgagtctcagcagataggaaaagggaaacagtgtttactttctgatttgggtatgtttgccacatagctgggttatttatttttcccttttctgtgacagaatgcctgagacaacttagcctaagaggagggaagactggtcacagtttcagatgtttgggtccattctggtgggaagggtgtggtggagcagttgattttacagtggacaggaagcagagggagaaaggaaggaatcagggacaagatacaacccccagggattccccacagtgacctgcttcctttagcttgaccccacctcctagagtttccagaaccagccaaaataacaccaacatctagaaagtctggatttaacacatgatcccatgaggatcatttatagtcaaagcacatcagtagcatttgcccctagttgcctggcctgttgctcgccctgaatacagtactgggcaaagggaggaaaactcaagctgagttgctaagaattgagagttagaggttactagctaattctgttgattctgcctggtgcaagagctcttggaatcaaccagaaagaacctgggttgtgtgggaagagtacggaaggtttaactcaagtgtacatagtgtatgcacacatagttctcattccctgtcttgagtgtcataatggtgtcgatcttttggtcaaaacccctgccttgggaggtagattcatttctttcaggcatagttttttaaaaaaaatctcttgacaatgttttattttgaatgttggaaggtcttttcctacaactaaattccatgcctcaggtaagagacgggaaggtctgtttgaggcagaggctcttccctgtgtccacaatgtcaggcactaaagtggagatgaggaagtctcctggatgactaggaaggtcctccagacaatgtgcttggtttcagtttggctttatgacaagtttcagctggaaaggttaagataacaccatacggaaaatggacatctgatgtcatgaggaagttagttagatcaccagtggtgactggtggtggtccatacctgtaatcctaacatgcaggaggctgagggaggcaagttcattccagggcatctctctctccctctttctccctctcatcattatttgaaccctcctgtaatattcatttctgtagcttctttgagagcacatggaactatggcgtgtgcttgtatttgattataaccatcagaatgctactccgatagcacagggcaatctagagcccccgctgacctgacgtggctgtgtggtttattgtcagtgattgcagaactgagatctattgcatgctaatttccaatctctagatgaactacttatcaagaacaatcatttacatatgttgtgacttacttttccttaacacataagggtgtttgtttgtttgtttgtttgtttgttttatgttcattggtgttctgcctgtatgtctgtgttagggtattgggtcctctggaactagatggggttacagaaaactgtgagctgccataaggtgctgggaattggacccaagtcctctggacaatcagacagagctcttaaccactgaaccatctctccaaccccccacgtaagggtatttcaaaggtgaacagtaagcaacttcaatacactctgcaagaacttgatgcttatgccttctctccccttcggggacaaaagtgcctcagctgcatgtgtccccttgcctacggcatgggaggaaggatacacagtccacctttgctgttgatgaatctgggttctggttcattctcagctccagatatttctcaccacaaagaaaatgacctggaaacttagttctgtgattgaacgtggtaagttcagtatccaagacccttccacttaactgtggctgcttctttctagagcatccagtggtaagaacaactcgaaaggaaacttttccagggattacaactttcttctgcagagctcatggcttctacccaccagaaatttccatgacatggatgaaaaatggggaagaaattgcccaagaagtggattacggaggggtacttcccagcggggatggaacctatcaaacgtggctgtcagttaatctggatcctcagagcaatgatgtttattcttgtcatgtggagcactgtggtcgccaaatggttctggaggcccctcggggttagtatgggggtagtggctatctgggaagtgagagtgagaaatgagatagaaagcggtgaagcctgtagggaagggatgctgggtcactgggtgggtcaccacaggcttcaccaggtggtggtgcagtggcaactgatttgtttgtttgtttgtttgtttgtttggttttagaggcatggtttctgtgtagccctggctatccctgaaacctgttttgtagaccaggctggtcttgaacacacacacctgcctctgcctcctgagtgctgggattaaaggtgtgaactacacctgacttcaatttctatttgtaattttaaaagtttttttaaattttattttatgtgcatgttgttgttgttgttttgttttgcctacatgtatggctgtgcagcacatgtataaaatgtccacaatggccagaggagaatcattgagtcctctggacttagagtgatagttagttgctagctaccatgtgttctgggtatccaacctagaacccccggaagagaggccagtgctcttaaccactgagccatctctccagtcccaagatttattttattatttttatttatgtatgtatctatgtgtgtatgtgtgagggtatgaatgtaagtaccaaacaagtttagaggaaagcatcagatcccttggagctggagttacaggtggttgtgagctatcccaggctggtgctggaagttcctccataagagcagtcaagtgctcttaatggctgagccatttctccagctccaacaatgtttgttttaatattgtttgtttgcttgtttatatatatgagtacactgtagctgtcttcagacacaccagaagagggcatcagatgccattgcagatggttgtgagccaccatgtggttgttacgaattgaactcaggacctctggaagggcagtcagtggtcttaactactgagccatctctccagcccctacaattgttctgttcagtgcttctcacggtgtttagttcccacactcatctatattcttatgaattactgaagaccttaaatagctgtcatttgtgtgtgtcatacctgttgcagattactatatcacatattacattaaaaaaaatatccaggtggtggtggcacatgcctttaaccccagcactcagaaggcagaggcagacaagtctctgaggcctggtttacaaagtgagctctgagacagccaggactacacagagaaaccctgtcttgaaaaaaccccaagatagatagatagatagatagatagatagatagatagatagatagatagatagatagatagatagataactgggtggcagaggcacatacctttaatcccagcactgggggcctagggtgaaggtgggagacaaaggcaggttgatctttgagtttgaggccagcctgatctgcaaagtcagtttcagggcagctggggctacacagagaaaccctgtcttaggaaaaacaaacacataaacgaagcatatgcacatatctatgtgccatcaggtggtgactgagaagtgatagccaggtttcctaatgaacactatgatacacttaatgcagatggcaggagcaacgtggagtttttctcatttacttacagaatcaggggacatccttcgagtgagcacgatctctggaaccacaattctcatcatcgccctggctggagttggtgttctgatctggagaaggtcacaaggtgagaggcaagcaggactcttggcagatgctgctagtagtttcctgaggcttctgttcactggatctgccacttgagttccaattagaaacagatagaccatcatgtaagaatcacatgagggcctgggacaacatttcccctctgtagaggaaacacctgttaatttttccatttgtcttagtgtgtgtttccattgctgtgaagagacaccatgaccaaggcaactcttataaaggacatttaattggggctcacactttaagaggtccagtgcattattatgatggagggaagcatggcagggtgcaggcaaacatggcgctggagtagctgattatttctgcaccttgatcagaaggcagctatgagaagtctctcctctagaaagctaggagaagggtctcaaagcccacccccaaagtgacacacttcctccaacaaggccacacccaatccaacaaggccacacccctagtagtgccacttcctgggccaagtatattcaaaccaccacaccattcttctatcccaattatatgaaagtcttctttctttgaaattcacttctcagcacatgaactgtttaaaagtcgataccattataaaataggacttgagataaggagaaggaggaaggagatatgctttagatagcatagataataaatccattcattaaacgtgtactaaatgtctgttgtataaatctattcattaaaaaacatgtatgaaatgtctgttgtgctttaagcatcatactgactcctgggaaacagcaatggaaaggacaagcaagaccccatgtcgtagagctaatggcataatcttgaaatgtcattttctatttctggtttactagttactcaagctgatcacaacagatattaatgaaacctggatcagggctcagaagctgggtgggtgagagcttgctttttcttgactgttgatgacttgaaaccaatccaggggatactatacgtgtgtggtattagttactcgtcggaaccagtccatttgctagaaaatcaacccagctagtgggtaagtaatgtttccataatcaatagagtacaatacgaatccttaacacgtcaacacatacatcttaagaagaaagttcctgcttcttctcctctggagtttgtaaattttgagttaaaaagtgacaagttctaggagaatcttgagaaagcagactaaaactgtcagtggctgcttcaaggttttgctgaatattgctaattttttgagctatgagaaagctatacagataactcactaaaaccttcttttcctttcagaactaaaagaagtcatgtaccaacccacccaagtgaatgagggaagctctccctcttaggagccacaatctctgctctcaggcatccgcatgtcttggccatactcctgatgcaaccggggactgtaaaactgagcacttgtgacaggaagataggagctacaaatttttcttcattctttggctccagaagagctgtcaacttttaggctcttgatagactcctttatcacagtcaactttaaatatagtttgtctcatgacccaatacttcccaatattgtagttctcaatagtgatttacaagtagatcacagagtatcagagccgcaagcaactttctcacctaagcaggagatgtcttctaaaatgtcatagacttgagcattagccttcactcaacattatgtgcaagttcccccattctactacaaaacagcctttcttgttcattttctctcctgagaatgtttaccatgtaagaactttgaccactatggctctcatgtttgagaatctataagtagggttgagccaacccatgaaaatagccagcaagtttctacagcagcctttgagtggacgagtcactatatacatatcatggcccaaggggaggcagaagtatccagttcatggtggctctgtcagaaagcaaggaatattgcatgtttgtctggctacatttatggcaatgacttcctttgcttttactgtttctgtgagaaattagaacaataatttatcaagctgagtgtgatgggaatcttagaagcccagtactcaggaagctgaagcaggtagattttacatttggggctagcttgagctacacaatgaaaccctatctgaaataaaccaaaacaacaacaacagcaacacacttaacagaactaaaacaatcattaccagacatattgtcccctcccatggaacggcagacctagactcacttgcaatatttcaacatgaaataatagtgtttggctggagatgtccaggtgggtgaagatgtctgttgccaagcatgtccacctgaggtcagacaccctgacccacacacacagtgaaagaaaaaaactgactcctgaaagttgccctctgacctctccatgagtgctaaactaaggtttttatttttgtttttgttttaatctgacaaaatgtgttcatatgcttatgtctcaaaacgagttctctttactctggtattggagactgaaccagtacagaaaagacaggagttagaattgaacctttgggggtttagggtgtagctcagtggcagagaattttcttagcatgtatgaggccctgaggtcagtcttcagcactttgaacacacacacatacacacaccaccaccaccaccaccactaataacaaacaaaaactaaaactttggatctttcttctgtaagtggttt

SEQ ID NO: 66 - DNA, 2398 bp, Mus musculus
ggttgatgatgctcctgttacctctgctcgctgtattcttggtgaagcgaagccatactcggacccactcgctgagatattttcgtctagctgtttccgatcctggtcccgtcgtccctgaatttatctctgttgggtatgtggactcacaccctatcactacatacgacagtgtcactcgacagaaggagccgaaagctccatggatggcagagaacctggcacctgatcactgggagaggtacactcagctgctaaggggctggcagcagacattcaaggcggagctgaggcacctacagaggcactacaaccactcagggcttcacacctaccagagaatgattggctgtgagttgctagaagatggcagcaccacagggtttctccagtatgcatatgatggacaagatttcatcatcttcaataaagacaccctctcctggttggccatggattatgtggctcacatcaccaagcaagcatgggaggccaacctgcatgagttgcaataccaaaagaactggctggaagaagaatgcattgcctggctaaagaggttcttggaatatggaagagataccctagaaagaacagagcatccagtggtaagaacaactcgaaaggaaacttttccagggattacaactttcttctgcagagctcatggcttctacccaccagaaatttccatgacatggatgaaaaatggggaagaaattgcccaagaagtggattacggaggggtacttcccagcggggatggaacctatcaaacgtggctgtcagttaatctggatcctcagagcaatgatgtttattcttgtcatgtggagcactgtggtcgccaaatggttctggaggcccctcgggaatcaggggacatccttcgagtgagcacgatctctggaaccacaattctcatcatcgccctggctggagttggtgttctgatctggagaaggtcacaagaactaaaagaagtcatgtaccaacccacccaagtgaatgagggaagctctccctcttaggagccacaatctctgctctcaggcatccgcatgtcttggccatactcctgatgcaaccggggactgtaaaactgagcacttgtgacaggaagataggagctacaaatttttcttcattctttggctccagaagagctgtcaacttttaggctcttgatagactcctttatcacagtcaactttaaatatagtttgtctcatgacccaatacttcccaatattgtagttctcaatagtgatttacaagtagatcacagagtatcagagccgcaagcaactttctcacctaagcaggagatgtcttctaaaatgtcatagacttgagcattagccttcactcaacattatgtgcaagttcccccattctactacaaaacagcctttcttgttcattttctctcctgagaatgtttaccatgtaagaactttgaccactatggctctcatgtttgagaatctataagtagggttgagccaacccatgaaaatagccagcaagtttctacagcagcctttgagtggacgagtcactatatacatatcatggcccaaggggaggcagaagtatccagttcatggtggctctgtcagaaagcaaggaatattgcatgtttgtctggctacatttatggcaatgacttcctttgcttttactgtttctgtgagaaattagaacaataatttatcaagctgagtgtgatgggaatcttagaagcccagtactcaggaagctgaagcaggtagattttacatttggggctagcttgagctacacaatgaaaccctatctgaaataaaccaaaacaacaacaacagcaacacacttaacagaactaaaacaatcattaccagacatattgtcccctcccatggaacggcagacctagactcacttgcaatatttcaacatgaaataatagtgtttggctggagatgtccaggtgggtgaagatgtctgttgccaagcatgtccacctgaggtcagacaccctgacccacacacacagtgaaagaaaaaaactgactcctgaaagttgccctctgacctctccatgagtgctaaactaaggtttttatttttgtttttgttttaatctgacaaaatgtgttcatatgcttatgtctcaaaacgagttctctttactctggtattggagactgaaccagtacagaaaagacaggagttagaattgaacctttgggggtttagggtgtagctcagtggcagagaattttcttagcatgtatgaggccctgaggtcagtcttcagcactttgaacacacacacatacacacaccaccaccaccaccaccactaataacaaacaaaaactaaaactttggatctttcttctgtaagtggttt

SEQ ID NO: 67 - protein, 339 aa, Mus musculus
MMLLLPLLAVFLVKRSHTRTHSLRYFRLAVSDPGPVVPEFISVGYVDSHPITTYDSVTRQKEPKAPWMAENLAPDHWERYTQLLRGWQQTFKAELRHLQRHYNHSGLHTYQRMIGCELLEDGSTTGFLQYAYDGQDFIIFNKDTLSWLAMDYVAHITKQAWEANLHELQYQKNWLEEECIAWLKRFLEYGRDTLERTEHPVVRTTRKETFPGITTFFCRAHGFYPPEISMTWMKNGEEIAQEVDYGGVLPSGDGTYQTWLSVNLDPQSNDVYSCHVEHCGRQMVLEAPRESGDILRVSTISGTTILIIAGVGVLIWRRSQELKEVMYQPTQVNEGSSPS

SEQ ID NO: 68 - DNA, 22235 bp, Homo sapiens
cagtttttggttaaaagaacccggaaagagaaggactatgggggaactgatggcgttcctgttacctctcatcattgtgttaatggtgaagcacagcgattcccgtgagtatcccacgtcctcttctctcctaactccaaagtcgaggcagcctagaaggcacagcttttcttcctaaaacttgtggtgaaaaatatagaagccaggggcagaaacgtgtatgtattacactcagactccaggagcaatggattgcctgaacagtttcccagttcatatttgtaggattttgatgtcaccaccttctgagggagggggagccgttctagaaagactctggaacttcctcactttccctctgagcatggcctcctttcttttctgctcatattttttcttttacttttgtttctcctcttttctaacttccagagtctcatgaggatgtagtcagagtttcaggggcattaacagtggagtagatccattgttcaggtttatttatgtttttcctcctcaacacaagccctacctgtaataaaagatccaagaaagataaaaccatggctctgggtttgtttactgactgtgagaagtattaatcaagtagaagggagagtttttcattattcggggagctcaagtcactggggaagcaaatgccttctgttgcctcaaataggggaaagggcccatgggctagaaccaccaggcttctctgccctaatcacttgctccctgggctgaggactggtactggtgggcagtgtccagaacttagacttggccaccaccataggtgtgactgatgaacatgagaggaaggagttctttcaaatcacccatgcacatagagagtggaatgactgaccatggagatttggaagggcgaggggggtggatgattagaaattacttaatgggtacaatgtgtgttacttgggtgatggataccttaaagccccaacttgaccactacacaatctatgctataacaaaattgcatgtgtacatcataaatttatacaaataaaaaaattttaaatcatatggctgggagtggtggctcacacctgtaatcctagcacgttgagaggccgaggcagacggatcgcttgaggtcaggagtttgaaaccagcttggccatcatagtgaaaccccatctcactaaaaatacaaaaaattagctcggcacacccatctctactaaaaatacaaaaaattagctgtgcacagtgcgcacctgtgatcccagctactcgggagactgaggcaggagaatcacttgaacccaggaggcggaggttgcagtgagccgagatcatgccactgcactctagcctgggtgacagagtgagactccatctcaaaaaaaaaaaatccatatattaattgttcaaatattgattgatggcctactatgtgccaggcactttgggggatatggcagcgaacaagacaaacatagtctctgcttccatgaaaatttaatccagaaagtgtcatcatttatgggaaagattgggggtgagggtaagaggcagaagatgaaagaggaaaggaggagagaggcaaagggtgatatttttggaaataataaagcttatatattacctgcatgtgattctcaaagaactctccaataatatggaataatattccttaaacatattatctcctatgacaatctcactgactatttgtagtaggtgaagaaaatatccccatttaaagatgaggcctagatttttctctaggcctagagagtgaccacgctcacataaggagcaacctgaaggagactgcagatcttctggccctcggtccagggctgttccacaatgtcattgctcctttgggtgtgaagacttgtcactttgataattggggggacaggaaataaaacaagtaagttataaaggcaagggaaggtcacttggtgctggctgttctccttctgactccttagagtgcatccttctctgttctgttctgtgtccttgaggctgactgctagactgcatcacctagactctcttgcaagctgatttctgcttgggttcatacaatgggagacactgaaaggagagatgtcagagagcagggaggaaagagaggctgggatacatctttcttgctccttccccactttctgtgatgtctttggcagtagctatgttcttctgtaatgctgtcttccctgaataaccccttcttcatggttctagctcccattgggcttcagtaacggtatttgctattcttatctcttaagccctaggggtgataatggcttcccatagttgttagcctgcagatgcccatcatccttgtttgttccgttaaccttgaccatatctctgcaaggagtcccttcattaaggtctcctcacatgacccatctggcttgaaggctgtttcctgctaggaccctaactgaacattcctgggctttgagggatattggctggaaaaggatatgagattatgaaagaagactcagtctacttgatatttatgcctagtgctagccctgagtgggagctatataccagtaatagatggggaaacacggggaagagatactgcagggttgtgggtcattactccaggaaatgtcaacataactccaatatcactttcagtgtgttgctttcatcaactccacagcctgcagttgactcctccttcctttgtgctcccatggctcctgttcacagttctgtaattttccatttacaaaaatcttctctttgaggctctccttaaagacagaaagagatatcttcatttttttcttatttctctggtatacctagtgcccaacaggcacttagtaaatgtttgctgagtgaatttatgttcggaggtaatgtccctaagaaatcacagttatttgactgggagccatagagagctcgggcagtaataacgactgcaaattcaaaactgtggcttactgtagttgcaggatttgtattaaaaaggtgtttcatgcttttacaactcatcttgttcttcatttcagcctgtgtgaaactgtgaattggcgatatgggtgggtgtaatcagactgggggctggcatgagatttctcatgcattgccatatgtgatttgtatgtttcatctcgacataaccaaggtcagtctcttgatattactcataattttatggctgtataaatctgctatatcaatctacttcatgaatggtggagtccttcacaggcgaggtctgatgatggataagctccctaagctgccaactgggttactgttaaaaaacagacttgcatattatctgcttagaagtgaccttgagttcaaagagttaacatgagaaaatatgggctttttctttagactttattagatagacttcagtctgtttccatggagctgttgccaaggtatatgccatagaaatttctccaagacaatgtttcactcccctaaggccctcttcttaattggcattgaatctatctaaacttgagaaattcaactaatttgtagatttttcttttgactagttgaaatatctgtctattctcacttgaccccaatcctcttaccccacagtattgctaagagctggaggaaaggagcctaagttaaagatcaaacacatgactctttgaacacttattttagggaactcaaattgagaaagatgacaaaggatgttttttctgatgtatgaatttatatttatcggggaaaatctttcaagagtatacatattaagtcacattttgttataacttcaaaggatcattttagaaaaataaaatttataaaatcgggattttctgggaaacatgagacatatagtcatcattgtgtacagagagtactgagggaaaaaagacaccagagctcattcattcgttttccaaaactccacatagtcctacagggctcactttcttactccattcacatctctgctcaaatgccacctgctgtggtccctctatctaaaagatcaggccttctcctctccacactctcttttctctgctttacttttcttcataatctttatctccacctgaccttgtattatatatgtatttattgccaatctcctgtctagaaattatctcacagggctgggactttcatgtgttcattgctctgtttccagcagctaggactgtgcttattggacattcagaaaagaatatacctatatgaagtgagacattggcaaccttcaaaagggtagcctcagaagagtagctcacaagccaaacttgtcacagtcgccacttttatgctctaagttcctgtagttagttagacatgtcattaggagaggggactaatggttcttgctgcacatagaaccatccatgaacatggcctgagatgtgtccaaaggtccccttaactaaaaatattgccacctacttctcccctcattcccacgatgctcgaaattctaaagagtcattcccaggaatcataatcattttgaccttattaaggcattggacttcttgagagagccaataaataatcagactgtgttgacctggttatccaatcaggactcacggccacctgtgtgtaggaaggtctggagcctgtggccccagggactgggaaatcagaggcagtgagtcatccttgacacaagggggcaggagagagcagtgataatccaggggctagaagcctggcctggaaagcttcccctacactagggagggttgggtagtctcaaggtagagggacttcccatggagagatcacagtgtgattcctggttccttcacttatggattctgaggatgatcttgggcaattaatctctctgcacctattttcttttctttttttttgagatggagttttgctcttattgcccaggctggagtgcaatggcgtgatcccggctcactacaacctccgcctcctgggttcaagcgattctcctgcctcagcctcccaagtagctgggattacaggcatgcgccaccacacccagctaattttttgcatttttagtagggacagagtttctccgtgttggcaaggctggtcttgaactcctgacctcaggtgatccgcctgccttggccccccaaagtgctgggattacaggcatgagccaccacacccggcctctctgcacctattttctatctgtgggttggaattataagacctacctcaaaagtttgttagaagaataagtgaaacccatgcttatcaagggcttaaaatggtacctaacacaaggtatgtgctcaataaacaaatacagttgtgatgactatgattaagatgctgctgccctttatgcctcattgaaggcccatctgatctgccacctccttggaacatttcccagtggatcccttctcatgggaccacggtctctcttctcctagtggctggagcactccattggtactcttttctggcgcttgctgcttgttgccgtgtgtggtggaattcatttatttgttatgtgctttagctccccaataatactgtaagttcctggaggaaagagctggtatttgatttgttcttctcttcctaacattgcctccaattccttgtacatagtagacactaaataaataattgcccccatgaggccgggcgcggtggctcacgcctgtaatcccaacattttgggaggctgaggtgggtggatcacctgaggtcatgagttcgagaccagcctgaccaacatggtgaaaccctgtctctactaaaaatacaaaaattagctgagtgtagtggtgggcgcctataatcccaactactctggaggctgaggcaggagaatcgcttgaacccaggaggcagaggttgcagtgagccaagatcatgccactgcactccagcctgggtgtcagagcgagactccatctcaaaaaaaaaaaaaaaagaaaaaagaaaagaaaaattgccctcatggatgaagtgaaaacacttcatcaattattttacaatccagtgattttcacagccttttgtaagaatggcccaactggttaatggacaggttaaagggaacatgatttagaactatcaagtagccattgcacctagcctaagagtttttggttgtgtcgttcgggttctccagcactatctgtcagaagctgatgagactgggcaggagatgccttttgagaagtagcttgactggtttagacagaataccaaattctaaattgtatatttcagcttaataagtgagttgatgctgatgatctatctgttcatggaaagggagagagagacttaatttcaaaattattagggcgagaaaagagaaatggaagattagatcaaatgatatgaaattgccatttttataggtcaaaaatggtcaaatattggcctttccaaatgattcgaaatctgattatgtctgcaacaaatcctggtgggatataaattatcacaagttttaatgtactaggagagagagggtacctggacttttcctcatcttttctgttgtgagttactgactgaacatgtgtcaatcaacttcccaccacagcagaggtaacattttaaaggcccagctaaggagcaagcatgacttgttcctgtggaggcaccagatgggtaactgggcccatggcaaatgaagaggaagggactgtgatgtcctggagcagagccacgctgggctgaaccagtggtggatgggtgtgactgaaaaagcaagtccagcctttaggtgcctggactttgaagtcaaggctggctggtggagaacaactgtttcaaaaccaggcatcagaattagattgaagttaaaaaaaaaaaaaacccagaaagaaagaaagacacagccaggcacggtggctcatgtctgtaatcccagcactttgggaggccaaggcagggggaatcatgaggtaggagttcaagaccagcctggccaacgtggtgaaaccccatctctactaaaaataaaaaaattagctgggtgtagtggcaggcgcctgtaatctcagctacttgggaggctgaggcaggagaatcgcttgaacctgggaggcagaggttgcagtgagcagagactgtgccactgcactccagcccgggtgacagagtgagactctgtctcaataaataaataaataaataaataaataaataaataaagcacaatacttacttggacagtattgtcaacagaccatatttctctctatctacctcttttaacttcagataatgcaaattcttgtgaaaattacatttttataagaaagcaaagttacatgaattgtaaatattatgtttggagatgatgctggtgatacttaactggaataaatcctgctattgggcactaatgccccaagttgttaatactggaggtttttttgcttgttggcatctatcaggaatgtagacctcagagatcataaaaatagaaaacccagattccaggggatgttctacaccaacccagcttagctcagcaacacagcatctttttttcttccttcttttttctcctctccacattctctgtctggagtctgctctccgtggggattttttcccatgaaaaactatggaagtgattcctccctctttcttttcccctcactccctcaactccagccacaggcctttgtgctgctcctggaatgtgccaggcatgttctttccaggggcctttgcatggcccttcttgtccagactgctgtccccagacacctgcctgtctccccaactccttgcaggcacttgctcagaattcagctttgtgggaaaccttccttaatacgccttccttttttaaatagtgttgcccattcctctttgcagttttatttttcttcactgtactttaaaaaaattatatattttattttctagtctgtcttctccccttcccccgactagggtgtagactccatgagggcagacatttttatctgtttggtctggtacaagcttagggcctagaagagtggctggcacagaagaagcattggatatacaaatcaatattaaggaagtgtgagaactaatattcacaacttgttcctccttttgggtcctccttctttagacagttgtgtacctccagtgtagccacaaaactttccagatgtgaaaaaatagaactatttcaaaatcaattgcagaatatatatagtaccctttgcagatcccagattgcagttcaactctccattcaccagccttcccttgaatcaaagataatttttttttttttttttttgagatggagtctcgctcttgttgcccaggctggagtgcagtggcgcgatctcggctcaccacaacctccacctcccaggttcaagcgattctcctgcctcacctccctagtagctgggattacaggcatgcgccaccatgcctggctaattttgtatttttagtagagatggggtttctccatgttggtcaggctggtcttgaactcctgaccttaggtgatccacccacctcggcctccaaaagtgctgggattagaggcgacacccgcgcccggccaaatcaaaaatattttttaggccaggtgcggtggctcacgcctgtaatcccagcactttgggagaccaaggcaggcagatcacctgaggtcgggagttcaagaccagcctggccaacgtggcaaaaacccgtctatactaaaaaaaaatacaaaaattagccaggcgtgatggtgggcacctgtaatcccagctacttgggaggctggggcagggagaattgcctgaagcagggaggcagaggccgcagtgagccgagatcacgccactgcactccaacctgggcgacagaatgagactctgtctcaaaaaagatccaggttaaatagattcatattcatttcagcatatttcattattccaaaccacagaaataaagtgtttcaccaacaatttaattcacccaatatttaccaagctactaccatgtgccaagctccctgtgctaagctttgcaggaaatacaaaggaaaaaagcaaagtccctgttcttaagtgctttaagattgagaagcaggtagaaggtagtaagcagagggaaacagaaggcagaatctggtagctattggttttacgacagaactcatgctctgatgcaatctctggctcttgtttgcataagaaccaacacttttatgaagaggctctcatgactaccccagaggcttccactgtcttccctcccaacccaagccctcacccaccacaggaagggaagggggaagtaaaaggtcaaagcaatacagagggacattgggaccttatgctgccccagcctgtgggaggccagcctccatcctgttcagtattgcagctgacatgcaggataacacctgtgagggaggagcccatggggcggggatacctactctgaaccctgccaaactgctacaccccagctccaggagcaaggagaaagaagtgctaacaatgattttaattgctgggcgtggtggctcacatctctaatcccagcactttgggaggccaaagtgggaggatcacttaaggccaggaatttgagaccagcctgggcaacacagaccctgtctctattaaaaagaagtggtgacgtgcttataatcccagctactcaggaggctgaggtgagaggaccacttaagcccaggaattcaaggctacagtgagctgtgatcatgccgctgcactccagctgggcaacagagtaaaaccctgtcatacacacacacacatatgcacacacatacatacactaactagtacaatcagttgctctgggagatacctctcagggcctcttgtttttcctagtatgcaaggtaagggtaccctggccttggggtggtcagttctgaaagataacctgcacattatgagttatttcataagcagttttagagaaaagaaaaatataaacaaacttgtagcacagaagctaatccaactattttgtgagctgattttttttttttgtctgatcttttttttttttttttttttgagacagagtctcactctgtcgcccaggctggagtgcagtggcgtgatcttggctcactgcaagctccgcctcccgggttcacaccattctcctgcctcagcctcccaagtagctgggactacaggtgcctgccacaacgcctggctaattttttgtatttttagtagagacggggtttcaccatgttagccaggttggtctcgatctcctgacctcatgatccgcccgcgtcggcctcccaaagtgctgggattacaggagtgagccactgcgcccggcctgatcttttttcttaactatatgcttataaatgaggaggaaggaatgaatatcattaagtggtattcacccttgcaagattctctatagtggcaagggccaggttagaagatctgaatgtaggggaggtcctaaaggtgatggcagcagcagggtgggcaatctggaaagactggggaagtgttgtgtagtacagctcttagacacaggcaagagaagcccctggatatggccccacattcagagagccccactctggccctctgctacccacatcctttcccacagagcgaggagtgcgtgaggctgaggggaggtggtaaccctgtgtctgggcccctccactctagaccagactccaggcacccaggaacctggagttccccactcagctgactcagagctgctgaggtttacacaacaaactcgcactttggcccatcctcctaaaggtggactggctgcccttgagggccttgctaggcctgaggggtggccaagaggtgggaggatcacttaagcccaggacaagctcagacaagaggcagtttgtggctgagcctgaataaaaaagtagaggtgtttaattgtgggaggcccttggcagtgctggaaggagcaagaaacaggaagaaaaagaggtgagtctcaggctgagggccggggactggagggagacaccagctttctctgtgccgccccattcaggcccagaacttcacacagtgtgagattttttaatttgaacttggtcttcgaagccatacaaagggcaatctctcaaggtggggggatagaacatatttcaagtttgttagattgatttattccttttaaatatctggatctctggtatgtgagcctccatctgtcatctcaatttagccatgaaattttagggatgatcctgttttagggatgaaatgtttttggaggtgggttttgaggactgggaaggatttagatgggtcagaatggcaggagataacaggacaaaaggcttggacatgggcatctgcagacaccggcaggcagagtaggggaagaaagccattgtggctgcataccttctatttgccagcttttggggatggcatggggtacgtagccttctcagcctgggctccacctcccaggcatcgcctctgcccgtgacgcctgtcactgtgctccagacgtcccaggccatttggttcccatgcacgccccgccttctcgaacctcctgcttgcacatgtggtctctgccctgctccccctgcccgccctcctgcatcccctcccagcccctctgcctactcacctcctacctgtccctgagacctccctaagacatcaccttctctggaagtctctcctaagggcccacaccagcttggatcccataacactgagaggtgacagcgtgctggcagtcctcacagccctagctcgctcttggcgcctccgctgcctgggctcccactttggcggcacttgaggagcccttcagcccaccgctgcactgtgggagcccctttctgggctggccaaagccggagcccgctcccgcagcttgcagggaggtgtggagggagaggcgcgagcgggaacccgggctgcgggcggcgcttgcgggccagctggagttccaagtgggcgtgggcttggcgggccctgcactgggggcagccggccctgccggcccgggcaatgaggggcttagcacccgggccagcggctgcggagggtgtactgggtcccccagaagtgccagcccaccagcgctgcagctcgatttctcgccgggccttagctgccttcctgcggggcagggcttggggacctgcagcccgccatgcctgagcctcccaccccctccatgggcctctgtgcggcccgagcctccccgatgagcgccacccctgctccacggcgccagtcccatgaccacccaagggctgaggagtgcgggcgcacggcgcgggaatggcaggcagctccacctgcagccccagtgggggatccactgggtgaagccagctgggctcctgagtctggtggggacgtggagaacctttatgtctagctaagggattgtaaatacaccaatcggcactctgtatctagctcaaggtttgtaaacaccaatcagcaccctgtgtctagctcagggtttgtgactgcaccaatcgacactctgcatctagctactctggtggggacttggagaacctttgtgtggacactgtatctagctaatctggtggggacgtggagaacctttgtgtctagctgagggatggtaaacgcaccaatcagtgccctgtcaaaacagaccactgggctctaccaatcagcaggatgtgggtggggccagataagagaataaaagcaggctgcccgagccagcagtggcaaccgtctcgggtccgcttccacactgtggaagctttgttgtttcgctctttgcaataaatcctgctgctgctcactctttgggtccacactgcctttatgagctgtgacactcatggcgaaggtctgcagcttcactcctgaagccagcgagaccacgagcccaccaggaggaacgaacaactccagacgcaccgcctttagagctgtaacactcactgcgaaggtctgcagcttcactcctgagccagcgagagcaccaacccaacagaaagaagaaactccaaacacatccgaacatcagaaggaaaaaactccagacgcgccaccttaagagctgtaacactcaccgcgagggtccacggcttcattcttgaagtcagtgacaccaagaacccaccaattgcggacacaccaccacccataatgccaccttgaaaccactttgtctccgtcaggccctaagcttcttggacaagcggagagaagttcaatgtgggaacagcagggagggccaaacagttttgtttcattttggtttacttttaacccttattacaatccttataactagtaagtagaaaaagaataagaaaatggttaacagcagtggtttgacataataggaaaagcactgtgctttaaaaaaaaaaaaaatttcggccggccatggtggctcacacctgtaatcccagcaatttgggaggccgaggtgggcagatcatgaggtcaggagttcgagaccagcctgactaacatggcaaaaccctgtttttactaaaaatacaaaaattagccaggcatgctggcacatacctgtaatctcagctactcagtaggctgaggcaggagaatcacttgaacccaggaggcagaggttgcagtgagccaaggtcacgccactgcactccagcctgggcaacagagtgagactctgtctcaaaaaaataaataaataggctgggcacggtggttcacgctcataatcccagcactttgggaggccaaggcaggcggatcacgaggtcaggagtttgagaccagcctggtcaatatggtgaaaccccatctctactttaaaaatatacaaaaattagctgggcatggtggcacgcgcctgtagtcccagctactcaggaggctgaggcaggagaatcacttgaacccagaaggcagaggttgtagtaagccaagatcatgccactgcactccagcctgggcgacagagtgagactctgtctctaaaaaataaaaaataaaaaataaataaaataaataggccaggcgcggtggctcacgcctgtaatcccagcactttgggaggccgaggtgggtggatcacgaggtcaggagtacaagaccagcctgggcaagatggtgaaaccctgtctctactaaaaatacaaaaaaattagccaggcgtggtgaccagtgcctgttatcccagctatttcggaggctggggcagagaattgcttgaacccggtaggcggaggttgcagtgagccgagtttgtgccactgcactccagcctgggcaacagagcaagactccgtctcaaaaaaataaataaaataaaataaataaataaatttcggccaggcgcagtggctcatgcctataatcccagcactttgggaggccgaggtatgcagatcatgaggtcaggagtttgagaccagcctggccaacatgatgaaacactgactctactaaaactacaaaaaattagccaggcgtggtggtgtgtgcctgtaatctcagctacctgggaggctggagcaggacaatcacttgaacccaggaggcggaggttgcagtgaacagagatcgtgccattgcactccagcctgggcaacagagcaagactccatctcaaaaaaaaaaaaatgctcagtgcatgtgtttgtgtgcctgtgtgtatatgcccacacgtgcacacacagaggtggagtgggggtcctcatttattcaccagaggcttctttggtaaaagaagaaggctgcgtcatcagggttttcaagccttcagagttcccgagggctcccgcagggacagctccccctgtatccccaatgagtggtcttctcccttccccctacaaccatagcagcactctatattttgtctacaagttgagattacctataaaattccatcctgcatttgcaaacctgaacgagaaaggctccaagtcactggtctggagctcttacgtcctgtccaggccccggttcctgggttctgtggttctgtaagaggaaatggcagctggggcgtggaggcctgggtacagctgagtagggagcactcgtgtggggctaaatgaatgcagttgaaggatctggatcatctgggaccctacatgtcttccttctttgcctcctttccagggacgcactctctgagatattttcgcctgggcgtttcggatcccatccatggggtccctgaatttatttcggttgggtacgtggactcgcaccctatcaccacatatgacagtgtcactcggcagaaggagccacgggccccatggatggcagagaacctcgcgcctgatcactgggagaggtacactcagctgctgaggggctggcagcagatgttcaaggtggaactgaagcgcctacagaggcactacaatcactcaggtgtgcatgcggcagagacagacgcttcccccatcccaccccaacccgcagagacccctgggctggcctccaataagcggatgctgaattgcacctgctgtagctttggcaaagcctgaggaatcaggttggtggagttcagggcctcccatctgcctgtgcatcttctggactgtccctctctcccccaggagcactctgtcatttgccccacccactcttccccatctctgtatccgtatctgcatcccatttccactcaggcttctgatatgcatctccttttccattctaaatttgcccattctgcgtctcacttcctggtagtcaggcctagtgacttgcttatgagtatcgacagtaactttcccaggggtatttctggctcctgcatctctctccctcctccactgcagtcagaatagccacaaagtttatcagtcattcccattacaggataactccccaaggcgggaattagcacactcctttgacaggcagtaggtacttcacagatacctgctgacaggtgggcttccataagggggacctcctggggactcagcgatgccatggcaggcctggggggtgacataatgtagaccaaaggatgcttccagccatgcccctgctcccagcacttgagagcccacctctgtctctgtgtggacccctctgggcttctgtgtgtgttccagggtctcacacttaccagagaatgattggctgtgagctgctggaggatggaagcaccacaggatttctgcagtatgcatatgacgggcaggatttcctgatcttcaataaagacaccctctcctggctggctgtagataatgtggctcacaccatcaagcaggcatgggaggccaatcagcatgagttgctgtatcaaaagaattggctggaagaagaatgtattgcctggctaaagagattcctggagtatgggaaagacaccctacaaagaacaggtaaagagaaagagaaggcctcattcccacattgcctgaacaactgtttttatacgtaactcttttaatctaggttatatccactgtatcctgaaagccatctctttagttggcctattgtgatctcatggctagagcccccacgaaaactttccctggttacttttgagcagcatcttgacaagatttgacagttccccttgtcttgacagagtggagtacctccaagggcaccttgtttttagggatctattgaggcaaattcttccattccgtcaatgataagctgggaaattctttgggagatagagcaattcttacaaactgtttagttaacaaagggctcacacaccaccagtaggagtaaaaatctggatttaccaagacaaacagaaggtctctgctttactaaaggattaatgaggttgggcatgatggctcatgcctgtaatcctagcactttgggaggctgaggcaggaggattgcttaaggccaggagtttaagactggcctgggtaacattgtgagaccctgtctctattaaaaaaaaaattagctgagcatggtggcacatgactgtagtcccagatactcaggaggctgaggtgggaggatctcttgagcctggaaggtcaaggctgcagtgagccatgatcatgatcagcctgggtcacagagcaagaccctatttaaaaaaaaaaaaaagtattaatgataagattcctttcagcaaagagctcctcttataccttaaagatatgattcagttggtcaacttttagttcatatagaacttttcatgtatggtcttgttattcaaaattaatcacacctgtatgatgctacaggaaactcctagatacaatgtgtgtgggaagagtatgggaagctcccctctccaggcctctgtctacattcagtgtcctaatggattttcaaccttttggtcaaaacacactcctaaaaaaacaaacaaaaaaaaaaaagaaaagaaaaaacacattcctagaaaaggatcttggattaatttcttacaggccctatcaaaaagcacagtccctcctagtagcatttattttacttttaatgttggaaagcctttttctactaccaaatatcatgcctcggtaaagagacaaggaaagcattgttggagtgaaggctcttctccgtattgggttggccgatgataaggtgggggtcaggaggcaagtcagagatgagcaggaagcagtcccccccagatagtgcctttggtctcggtatggctgtttgacccaatttcagcaagaaacattaaggacaggactgtatggaaaattaagagtagtcatgaggaagcaaggtcacacgtgggtacttctttggtgtcactgctggagcccttctatgatatcagtttcttcgaaggcacaaccatggcatgatctactacatatgtttgtacctgatggcagtcatcaaaatgccagcgcaagtacacaaggcaattcggagccaaaactgagtggggatggctgtgttatttacgtgcactaaacacagaaatgagaacaaggagttctaatctccaatctattgctgacttacttattgggaacagtcacttacacattttatgggtcagttttccttgacacataaaggtatttcaaaggttactagtaaacaaccccagcacactttccaaacagtcaaagctgtatgactttccccccttagaggatggagcatgggccaactccacattcttcactacctagcaccttgccatcatggaaggtatacgtaaatacgtttgttgttgatgaacctgagttctgggtcattcttagctttagaagtttcctgcaataaagaaaaattaggaaagccagttgccaagttctaatattatatgctcagtacataaggcactttgatttaactttagcttcttcttcctagagcccccactggtcagagtaaatcgcaaagaaacttttccaggggttacagctctcttctgcaaagctcatggcttttaccccccagaaatttacatgacatggatgaaaaacggggaagaaattgtccaagaaattgattatggagacattcttcccagtggggatggaacctatcaggcgtgggcatcaattgagcttgatcctcagagcagcaacctttactcctgtcatgtggagcactgcggtgtccacatggttcttcaggtcccccagggtaaggacggggatcgtggctgtctagggagagagcctggagaaaggggtgagcaggaaaccatgctcgctgccagggaggggaggatagatcactgcctcactcagtgtgccttagaatgggtcttttaaataagtggttctcacactttttggaaccaggacgccttcatactattaaaaaattattgaggaccccagagagcttttgctgatgtgggttatatctattgctatttactacattacaaattaaaaatttaaaaattaaacacgaatgggtgcagtggctcatgcctgtaatcccagcactttgggaggctgaggcaggtggatcacttgaggtcaggagttcgagaccagcctggccaacatggtgaaaccccatctctactaaaaatacaaaaattagccaggcatggtggcgcatgcctgtaatcccagctcctggaggctgaggcaggagaatcgcttgaacctgggaggtggaggttgcagtgagccgagatcgcaccactacactccagcctgtgcgaagggagcaagactccctctcaaaaaaacaaaaaaacaaaaaacaaaaaaacacaacccaggcgcagtggctcactcctgtaatgccagtactttgggaggctgacgcgagtgaactgcttgagcccaggagttcaagaccagcctgggcaacatactgagatctcatctctacaaaaaacacaacaattagctgggcatgatggcatgcgcctgtagtcccagctactgaggaggctaaggtgggaggatcgcttgagcccaggaggttgaggctgcagtgagctataatggcaccactgcacttccacctggacgacagagtgagacgctgtctcaaaaaaaaaaaaaaaattaaacacaagaaaacacaagcagatattccattagtggtcagattgatgagtgagaagcaacagtaaggaaaatggtgttgggtttcctgatgatcacagggacaaaagtcccagaaagttaacacagaagggaaaggggacttgtggattttttctcatttgcttgctttcagaatcagaaactatccctcttgtgatgaaagctgtctctgggtccattgtccttgtcattgtgctggctggagttggtgttctagtctggagaagaaggccccgaggtgagaggcacatggaagggatccagggggctgcagactctcctgcatctctccagttttattttctgcacctgctgctccctcctccattcagaaatggcttggctctcaggctgggatcacagaaggacctgggacaaccctcccaccatgtaggggacacaaagcatggataaagcttacagggagagtggtctcttttcataggtgatgcctgacatcaacaaactagtacatctgtccaggggaactgtccccctagaagttgggtcagagaagatatggggatcttgatttgtctttttccaaaccatctttttattattaattactattgacttctggggcagtgtcctttgtttcaagacttcagtcagttttcccattttgaccaccattctttcatcccaagcatatgaaagtccttttccttgtaaattcattattcaaaacattaaatatgtaagagtagataccttcagggaatgggacttagagtaaggaaaaggggaggagaagtaggagatatataggctcttgataatgtggaataacataaattcattcagtaagtatacattaatgacctactgtgctccaggcactgtactggttgctgggatataacaatgaacaagacagatacgatccctgttttcatagagcttacaatagagcctggtaaggttatctcctggctctggcttcactaattgctcaaattgatcacaggatagtaccgatgagaccatgctttgaacccaaagtggaccagaagtttggttttccttcatagacatagacctcaactccaattcaggtgataactgtacaaaagcatgttgttagatcaaagtaaaaccaacccttttactagaaaatcagctcagaggccgggcgtggtggcttacaacttgtaatcccagcactttgagaggccgaggcaggcggatcacttgaggtcaggagttcgagatcagcctggccaacatggtgaaaccctgcctctactgaaaatattaaaaaaaaaaaaattagctgggcgtggtggcacatgcctgtaatctcagctactcaggaggctgagacaggagaatcgcttgaacctgggaggcggaggttgccgtgagcaaagatcgctccattgcactccagcctgggcagcaagagcgagactctgtctcaaaaaagaaaaaagaaaagaaaagaaaagaaaatcagctcagagagttaatgggttgttaatgttttctttatagataaagtacagcactaatcctaatccaataaatgatagtgaaacaaacaaaaaatttttttacaatgacatccctctctcaataattatacagactgtgagttcctgctttttatcttatagagtttacaaatttgagctaaagtttgtcaagtactaagagaatcttgacaaagcaagctaaaactgtcgatgcctgtttctcagattttgctgaacactgcatactttatttttgagctgtgaggaaacattcttgtaatctgactaaaaacccctttcctttcagagcaaaatggagccatctaccttccaacaccagatcgatgattgcagatccctcttttccagttctccttcctctaggagccatgttatcctctgtcccccatagagtcaagcctagtgcttgaaggtcctgacgacacccacaacatacatgagagtaatgggattgagcatttatggcagcaacagaggagccacaaaatgttctttgttctttggctccaaaaagactgtcagctttcagtctcttttgatggactgttttatcagagttgactttaaatacagcttgtctcatgacacaacgcttccctacattctatttgtcaatgatgatttgcaactagttggagattctcagagcaggaaggaatcttttcaaccagagcaggaactgtcttctgcaatgccttggacttgagcctccagcctccacttgaacaccatgtgaagggaacctcagtacttcataaaatggcctttctcattcatctttcatgggaacatttattgtacaagcgctttgaatatcatgggcaccatgactgtgaccctacaggtaggattggatcactccatgagagtagccggcaggtttctacaatggcctgggaatggactgattatttttatacattttctggcctgagagaaagccaaagtcccctgctgttcacagcaaccctgcctgggagcttggaatcttggtaatctgcccggttggatctatggaggtagtctcaccctttttgtcttttgtgggaaattaagagaaataattatcagacatatcatcacctccagtggaactacagagacctggacccagctgcactattttaatgtaaaaataacagtatggccaggtgcagtggctcacgcctgtaatcccatcactttgagcagccaaggcgggcggatcacgaggtcaggagattaagaccatcctggccaatatggtgaaaccctgtctctactaaaataca

SEQ ID NO: 69 - DNA, 697 bp, Homo sapiens
cagtttttggttaaaagaacccggaaagagaaggactatgggggaactgatggcgttcctgttacctctcatcattgtgttaatggtgaagcacagcgattcccggacgcactctctgagatattttcgcctgggcgtttcggatcccatccatggggtccctgaatttatttcggttgggtacgtggactcgcaccctatcaccacatatgacagtgtcactcggcagaaggagccacgggccccatggatggcagagaacctcgcgcctgatcactgggagaggtacactcagctgctgaggggctggcagcagatgttcaaggtggaactgaagcgcctacagaggcactacaatcactcagggtctcacacttaccagagaatgattggctgtgagctgctggaggatggaagcaccacaggatttctgcagtatgcatatgacgggcaggatttcctgatcttcaataaagacaccctctcctggctggctgtagataatgtggctcacaccatcaagcaggcatgggaggccaatcagcatgagttgctgtatcaaaagaattggctggaagaagaatgtattgcctggctaaagagattcctggagtatgggaaagacaccctacaaagaacaggtaaagagaaagagaaggcctcattcccacattgcctgaacaactgtttttatacg

SEQ ID NO: 70 - protein, 220 aa, Homo sapiens
MGELMAFLLPLIIVLMVKHSDSRTHSLRYFRLGVSDPIHGVPEFISVGYVDSHPITTYDSVTRQKEPRAPWMAENLAPDHWERYTQLLRGWQQMFKVELKRLQRHYNHSGSHTYQRMIGCELLEDGSTTGFLQYAYDGQDFLIFNKDTLSWLAVDNVAHTIKQAWEANQHELLYQKNWLEEECIAWLKRFLEYGKDTLQRTGKEKEKASFPHCLNNCFYT

SEQ ID NO: 71 - DNA, 1872 bp, Homo sapiens
cagtttttggttaaaagaacccggaaagagaaggactatgggggaactgatggcgttcctgttacctctcatcattgtgttaatggtgaagcacagcgattcccggacgcactctctgagatattttcgcctgggcgtttcggatcccatccatggggtccctgaatttatttcggttgggtacgtggactcgcaccctatcaccacatatgacagtgtcactcggcagaaggagccacgggccccatggatggcagagaacctcgcgcctgatcactgggagaggtacactcagctgctgaggggctggcagcagatgttcaaggtggaactgaagcgcctacagaggcactacaatcactcagataatgtggctcacaccatcaagcaggcatgggaggccaatcagcatgagttgctgtatcaaaagaattggctggaagaagaatgtattgcctggctaaagagattcctggagtatgggaaagacaccctacaaagaacagagcccccactggtcagagtaaatcgcaaagaaacttttccaggggttacagctctcttctgcaaagctcatggcttttaccccccagaaatttacatgacatggatgaaaaacggggaagaaattgtccaagaaattgattatggagacattcttcccagtggggatggaacctatcaggcgtgggcatcaattgagcttgatcctcagagcagcaacctttactcctgtcatgtggagcactgcggtgtccacatggttcttcaggtcccccaggaatcagaaactatccctcttgtgatgaaagctgtctctgggtccattgtccttgtcattgtgctggctggagttggtgttctagtctggagaagaaggccccgagagcaaaatggagccatctaccttccaacaccagatcgatgattgcagatccctcttttccagttctccttcctctaggagccatgttatcctctgtcccccatagagtcaagcctagtgcttgaaggtcctgacgacacccacaacatacatgagagtaatgggattgagcatttatggcagcaacagaggagccacaaaatgttctttgttctttggctccaaaaagactgtcagctttcagtctcttttgatggactgttttatcagagttgactttaaatacagcttgtctcatgacacaacgcttccctacattctatttgtcaatgatgatttgcaactagttggagattctcagagcaggaaggaatcttttcaaccagagcaggaactgtcttctgcaatgccttggacttgagcctccagcctccacttgaacaccatgtgaagggaacctcagtacttcataaaatggcctttctcattcatctttcatgggaacatttattgtacaagcgctttgaatatcatgggcaccatgactgtgaccctacaggtaggattggatcactccatgagagtagccggcaggtttctacaatggcctgggaatggactgattatttttatacattttctggcctgagagaaagccaaagtcccctgctgttcacagcaaccctgcctgggagcttggaatcttggtaatctgcccggttggatctatggaggtagtctcaccctttttgtcttttgtgggaaattaagagaaataattatcagacatatcatcacctccagtggaactacagagacctggacccagctgcactattttaatgtaaaaataacagtatggccaggtgcagtggctcacgcctgtaatcccatcactttgagcagccaaggcgggcggatcacgaggtcaggagattaagaccatcctggccaatatggtgaaaccctgtctctactaaaataca

SEQ ID NO: 72 - protein, 294 aa, Homo sapiens
MGELMAFLLPLIIVLMVKHSDSRTHSLRYFRLGVSDPIHGVPEFISVGYVDSHPITTYDSVTRQKEPRAPWMAENLAPDHWERYTQLLRGWQQMFKVELKRLQRHYNHSDNVAHTIKQAWEANQHELLYQKNWLEEECIAWLKRFLEYGKDTLQRTEPPLVRVNRKETFPGVTALFCKAHGFYPPEIYMTWMKNGEEIVQEIDYGDILPSGDGTYQAWASIELDPQSSNKCHVEHCGVHMVLQVPQESETIPLVMKAVSGSIVLVIVLAGVGVLVWRRRPREQNGAIYLPTPDR

SEQ ID NO: 73 - DNA, 1731 bp, Homo sapiens
cagtttttggttaaaagaacccggaaagagaaggactatgggggaactgatggcgttcctgttacctctcatcattgtgttaatggtgaagcacagcgattcccggacgcactctctgagatattttcgcctgggcgtttcggatcccatccatggggtccctgaatttatttcggttgggtacgtggactcgcaccctatcaccacatatgacagtgtcactcggcagaaggagccacgggccccatggatggcagagaacctcgcgcctgatcactgggagaggtacactcagctgctgaggggctggcagcagatgttcaaggtggaactgaagcgcctacagaggcactacaatcactcagggtctcacacttaccagagaatgattggctgtgagctgctggaggatggaagcaccacaggatttctgcagtatgcatatgacgggcaggatttcctgatcttcaataaagacaccctctcctggctggctgtagataatgtggctcacaccatcaagcaggcatgggaggccaatcagcatgagttgctgtatcaaaagaattggctggaagaagaatgtattgcctggctaaagagattcctggagtatgggaaagacaccctacaaagaacagaatcagaaactatccctcttgtgatgaaagctgtctctgggtccattgtccttgtcattgtgctggctggagttggtgttctagtctggagaagaaggccccgagagcaaaatggagccatctaccttccaacaccagatcgatgattgcagatccctcttttccagttctccttcctctaggagccatgttatcctctgtcccccatagagtcaagcctagtgcttgaaggtcctgacgacacccacaacatacatgagagtaatgggattgagcatttatggcagcaacagaggagccacaaaatgttctttgttctttggctccaaaaagactgtcagctttcagtctcttttgatggactgttttatcagagttgactttaaatacagcttgtctcatgacacaacgcttccctacattctatttgtcaatgatgatttgcaactagttggagattctcagagcaggaaggaatcttttcaaccagagcaggaactgtcttctgcaatgccttggacttgagcctccagcctccacttgaacaccatgtgaagggaacctcagtacttcataaaatggcctttctcattcatctttcatgggaacatttattgtacaagcgctttgaatatcatgggcaccatgactgtgaccctacaggtaggattggatcactccatgagagtagccggcaggtttctacaatggcctgggaatggactgattatttttatacattttctggcctgagagaaagccaaagtcccctgctgttcacagcaaccctgcctgggagcttggaatcttggtaatctgcccggttggatctatggaggtagtctcaccctttttgtcttttgtgggaaattaagagaaataattatcagacatatcatcacctccagtggaactacagagacctggacccagctgcactattttaatgtaaaaataacagtatggccaggtgcagtggctcacgcctgtaatcccatcactttgagcagccaaggcgggcggatcacgaggtcaggagattaagaccatcctggccaatatggtgaaaccctgtctctactaaaataca

SEQ ID NO: 74 - protein, 249 aa, Homo sapiens
MGELMAFLLPLIIVLMVKHSDSRTHSLRYFRLGVSDPIHGVPEFISVGYVDSHPITTYDSVTRQKEPRAPWMAENLAPDHWERYTQLLRGWQQMFKVELKRLQRHYNHSGSHTYQRMIGCELLEDGSTTGFLQYAYDGQDFLIFNKDTLSWLAVDNVAHTIKQAWEANQHELLYQKNWLEEECIAWLKRFLEYGKDTLQRTESETIPLVMKAVSGSIVLVIVLAGVGVLVWRRRPREQNGAIYLPTPDR

SEQ ID NO: 75 - DNA, 2007 bp, Homo sapiens
cagtttttggttaaaagaacccggaaagagaaggactatgggggaactgatggcgttcctgttacctctcatcattgtgttaatggtgaagcacagcgattcccggacgcactctctgagatattttcgcctgggcgtttcggatcccatccatggggtccctgaatttatttcggttgggtacgtggactcgcaccctatcaccacatatgacagtgtcactcggcagaaggagccacgggccccatggatggcagagaacctcgcgcctgatcactgggagaggtacactcagctgctgaggggctggcagcagatgttcaaggtggaactgaagcgcctacagaggcactacaatcactcagggtctcacacttaccagagaatgattggctgtgagctgctggaggatggaagcaccacaggatttctgcagtatgcatatgacgggcaggatttcctgatcttcaataaagacaccctctcctggctggctgtagataatgtggctcacaccatcaagcaggcatgggaggccaatcagcatgagttgctgtatcaaaagaattggctggaagaagaatgtattgcctggctaaagagattcctggagtatgggaaagacaccctacaaagaacagagcccccactggtcagagtaaatcgcaaagaaacttttccaggggttacagctctcttctgcaaagctcatggcttttaccccccagaaatttacatgacatggatgaaaaacggggaagaaattgtccaagaaattgattatggagacattcttcccagtggggatggaacctatcaggcgtgggcatcaattgagcttgatcctcagagcagcaacctttactcctgtcatgtggagcactgcggtgtccacatggttcttcaggtcccccaggaatcagaaactatccctcttgtgatgaaagctgtctctgggtccattgtccttgtcattgtgctggctggagttggtgttctagtctggagaagaaggccccgagagcaaaatggagccatctaccttccaacaccagatcgatgattgcagatccctcttttccagttctccttcctctaggagccatgttatcctctgtcccccatagagtcaagcctagtgcttgaaggtcctgacgacacccacaacatacatgagagtaatgggattgagcatttatggcagcaacagaggagccacaaaatgttctttgttctttggctccaaaaagactgtcagctttcagtctcttttgatggactgttttatcagagttgactttaaatacagcttgtctcatgacacaacgcttccctacattctatttgtcaatgatgatttgcaactagttggagattctcagagcaggaaggaatcttttcaaccagagcaggaactgtcttctgcaatgccttggacttgagcctccagcctccacttgaacaccatgtgaagggaacctcagtacttcataaaatggcctttctcattcatctttcatgggaacatttattgtacaagcgctttgaatatcatgggcaccatgactgtgaccctacaggtaggattggatcactccatgagagtagccggcaggtttctacaatggcctgggaatggactgattatttttatacattttctggcctgagagaaagccaaagtcccctgctgttcacagcaaccctgcctgggagcttggaatcttggtaatctgcccggttggatctatggaggtagtctcaccctttttgtcttttgtgggaaattaagagaaataattatcagacatatcatcacctccagtggaactacagagacctggacccagctgcactattttaatgtaaaaataacagtatggccaggtgcagtggctcacgcctgtaatcccatcactttgagcagccaaggcgggcggatcacgaggtcaggagattaagaccatcctggccaatatggtgaaaccctgtctctactaaaataca

SEQ ID NO: 76 - protein, 339 aa, Homo sapiens
MGELMAFLLPLIIVLMVKHSDSRTHSLRYFRLGVSDPIHGVPEFISVGYVDSHPITTYDSVTRQKEPRAPWMAENLAPDHWERYTQLLRGWQQMFKVELKRLQRHYNHSGSHTYQRMIGCELLEDGSTTGFLQYAYDGQDFLIFNKDTLSWLAVDNVAHTIKQAWEANQHELLYQKNWLEEECIAWLKRFLEYGKDTLQRTEPPLVRVNRKETFPGVTALFCKAHGFYPPEIYMTWMKNGEEIVQEIDYGDILPSGDGTYQAWASIELDPQSSNKCHVEHCGVHMVLQVPQESETIPLVMKAVSGSIVLVIVLAGVGVLVWRRRPREQNGAIYLPTPDR

SEQ ID NO: 77 - DNA, 68592 bp, Mus musculus
  misc_feature (1)...(68592): n = A,T,C or G
gggccatgctcctagtctgcccgtgcttcttcctcctggtggttctgggaacccgctgggcgggctggggcagccaccaggcagaggccgcgcaactaaggcagttctatgtggcagctcaggggatcctctggaactatcatcctgagcccacagatccaaggtaactgggggtgaaatccaggtgggcttcttcaaggaagaaaatctattatagttgcaaggggtgggggtgggctgggaggaggaggaaaaggaaaaggaagaggaggaggaggagagagagagagagagagagagagagagagagagagagagactaatgttgtgtgggtgtaattttgtctctatggacataatttatcattttgaggatgtggaaatttcaatgtgaatggttagctgtggctttctttccaggtgcaatccctaatctgttttccccccacgtttgttagtttagtgtattgatgggttgaaaggacacacctccacagccctcttagcccttcctgtgcattcggcttaagccttttgacagtctgcttaaaaaaaagaaaaaggaccttctagttatataatatttattcctgttaaacacaagttcatcttctaaagaaaaagatgtcaaagctgtcaccatgtacttcattataaggagattttgttgccttcctataaacgattttcactgtgggttcagagggaagggaaggcacacttgtattttcacttttcctagacttacccctggctacctaatgtggcttcattttttcctctcattttgagttacttcctggaatatgacttatcctgggtattttggtctgccctgattattacccatgttagtgagcacataaggtagtcattcaaaggcatgtctaactaagaggaggcttaaataatatcaaacctaactttgagttgcagaatatattttgctaacctgcctgcagttacccaagtcatagattctacgtagcacttgcgaccacgagtgtttttattttaaatgctaagcctcgcttactggttgacgcatttttttcccttttagttgacatcaaagtttaagtgattgtgaaagatgtgttcctcttttacaattgcaaaaccaaagcaatcagccaaagaaaataatgtaatatcttgaaagcaatgtgtaatgttttagtataaatgaataatcagcctttgagtttgctgttgttggttctgggttgtttgggaaggcattgtattcagtcttggtatcatgctagtgagaaatatcacatctaaatgacttaaagattgcattttcagagtaataatctagaccacacccatactcttaggaaagtaccactaactgaacacctccaccccaccccaatcccaaaagaaaataacattatttccaacatcaattttgctgcttaggggcagagaacacagacttgtgttcaagtgactgcattcagcctggggtaaggcaaaggtaggtttgagttaacacaaggttagagatgaacaaattccgatcaaatgcacagcatgaggactctagctaacaacattgcacaggtcttcccctggtaaggaaagagaagtgggtaagttaccagtagggaaaactgctaaaggaagtttcccagggtcttcatccctcctgtgaaagatgtagttatcaagacacctgaccttgttgactctagacatagagactggagcggacacctactgggtcagctaaagctgaggaaatggtttaaccctccaggatctttatcaggagggtgtttatcctctgcatcttctaaggaagcgcctttatcttcccaatgcaggattttttctaatacaaatcctagagttttgccctactgctgtctttgctttcccaactagaggcaggctccatcagatggacaccaattcaccacaccttctagtcattcaaaaccacggaatgaaagtggaaaacgtttctaaatgatgtctgattcatcgactgagaaatggttcacatacacttctcagtgacttatatttttaatttagacctgaagttcgagtttgtgtgacgagcttaccatcctttatagaaaaaacttgactctgaagagcagacttagagaagcactgggcttgtgttcatgggagcatgcacactgaggcagaatgtctttgaaaagaccaatgattatcccattgacttcacttgtgatccaaatttataaaaccctgggctttggaaatacaataaattactgtcactttgctcttcaacaaaaatagtcacatagacacctttctttctggaatagaaatagatagatattatatgactttcaagttcgtttctgtactttatttccagtttgaattctataccttccttcaagaaaattgtctacagagagtatgaacagtattttaagaaagaaaagccacgatctagcaactcaggtaagcctacaaaatatattttttaaattactattatattggtgtttggacctaaaatctaataaacgctaaggaaaaagaaaaaaaaaaaaaacctctaccactgatctatatccctggtctacatctaaatttttattctgagacaaggtctctggggaagactatgaattgtgatttttctgtctcggattctcaactagatggcattataggcctgtgccaccagacacagcctgtagtttttattttaaatataatttttcgtggaaaatattgtattctttatacttaaagtatctacattgtgaactggtcagatggctcagtggctaaaggtaattgctgctaagcctgaagacctgagttccatccccagttccatggtagaaggaaagaatttaatctttcaagttggcctctgatctccacacatgcaccatgatacaagcacacaaacacaccccaaaataagtaactaaatattcatttagttatcttccattataggatatgtgatgtttttgtcaaacaccagcagtataatatgtatgctcagacccagtgagaatatggggctcttcaaattattgagaattttgtagatggtgaaatctaaaccaaactgcagtttttctgagcatggggtaatgtggaattgaacaggtcacatgttacacagccagccatgcctttagcctcggtcaataaagccaaacaaaaagtttcagtgtttcactttgtgtttattcatctagcaaaccacaggtgagcaccttctgcgggcttgacggtgaattaggcactatgagcaagcacaagagtagacaaagtaaacttagactttccttagttggctaggcactggtgtgccctaacagaatgaatttgctattgtttctatccagcttcctgtacccattcaaaggagctacatagatttgatcctctgcttttccaatagctatggcatttgaaggaaacctctcttctttctttctttcttttttttttcttttgtgcttccttaatcaaacactaacttattgagggctctgagatcttaactatacgaacctatttcacaggaatgacagaggtcatctccagggagagcatcttccagttgcattctttaccattagtttgctcaccttctcccagcctggtgatgatctgttatccatcctaggctcatctcctgcctcttctcctcccccaccccttccacctcctgctctcacctttgtcctctggtctctttcactcttcagttcttcctcaaatcaaatcttttccttctgaaaaaaaaaatcaccaacagaatatttttcaggtaaatcttatctagaaaaatgaaaatatctttctgttcctttaccactctctctcaatgcctccactcttcccttgctctccaaagtcagccacaactgtggtttttacagctacttacccaggagccatgtcctttaggacagagcttggattcccaccctagcctggctcaagtaccttttctctcttctgtatactcccagcaccctgaacttgcgcttgcctgttagagatgctgtgaggtttaacgaatacaaagtacttatcctatgctcaaacatgacaagagcttagcagaagttaactacattattgttattgctgctattccagttatgaattaggtctccatgagagcaggcctatcataatattgttgatatgtcaacacaatatttttgctcatttttatcttcttgtgccttataatttgtatatttatttacttttaaataaagacagttaagtattctgttaatgatcacaacctaggaacgccacctctgaggctccgtaaaggtgaattctgactttctgtcatctgtcagctggtagagatgactgcgaatggaacattatagcacagtgttaaggaagaacaatacggaacagtctccactttagtggtgaggagagagagaaaaccgggattgggaggccagacgtgggtgtgggttgggtataaagatgcattttagaacagaagtggagaacatgagggtttagatcaaaggttcccagcctctgggttgaaaccctttagggattaaatgaccctgtcacgggggagactatcaaaaaacacaaatatttacattatgattcataggagtagcaaaattacagttatgaggtcgcaatgaaaataattttatggttgggggggtcattacaacatgctgaactacattaaaaggtgaaagctttgtcttgagggaaatagagggacactgagatcatttaaatgggagagagtaggatccaggttagcattttaggttctgctttcaatattgctctatgagtgtgaaccaactgcaatgccacacgtgtaggaaaatgccatcataaatgccattgttccccatgctaactgaaaattaattaaaagctttgttctctccaaatctggaagctggattcgcgggcagagaaaatggtaatgtggctttggtcccaatccaggaaacaagacagcagggaagctggggtggagaacattaaatggattccaaagatacttaggagctaaaatcagccaaacaggtagttaattggatggagacaagagaagggaattatgactgacatcaaagtttctggattgagtagtaaaatgtagaatgtactgtgtacaatgtagaatgtgccattcaatgagaaagagaactgaaaaaaaaaaaaagaagaaggatgcttgtttgggaagataatgaggtcagatttggagtctggggtagaatgtagaatgtctacctagtgttatcaaaggagcaggtgggtataggagttttgcttttaggtaggagaactgagctagatagatacaaatattcaggagacatcataaccaggttacaaaggaagctctgagggggacacacaagatcactcaagggaaatataatgagaagaggaggctataaacagagctcaaaggagcaacagagtccaagggataagccaagaaagcaatggtcaccaaaaagcttaagaaagtcttcctagagagggtggaggagaggtggaggctgagattccctggaagcagagacaaatggcacaaacagcaatcagtgctcatggagagggccataaagcctgctttctgcagcagtagtgggctgagaaatgaggacagggctctggggagtgaatggcaggtgaagaaatggaaacagacagaaagaataattcttcctgaaagttctggagatcaatgagagattcaagggtatctgggtacagcccagggatgcgatgtttactgactcagtagaaaagctacctggggggatggataactgatggatctagatacagaagaagcaggaagtgctgccattaaaagctgttccttaagtggaaaggccgttgtcctcgctgggagtcccagggtggggcattacgtttatactccagctcagagttgagcgtgttcaatagattcataagaaccatgcaacttgtaagtaaatgagaacagattcgccaggccgagaagagaaggcaggtaggtattcaaagctgaatgctctgtggctttcgccaggttcaccaaatattgatgtcattgccaggcaatgtattgtgctggatgcacagtgacagaaagggccacggccagggtggagacttttgaactgacagaagaaggcaccggtaggttttctgagagagagaccactgtggcagatgtcctgtcagatgtcttttgtagcgagttcctgagacgcagccttgttagtcagaagaccttgaaggctggtgagaacagcctggaccttgtgtaaaccctttcgctttaaacgttagtttcctgtcagagcctgtgcattgaagtatatgtttaatgtggggcaactggggaactgaaacacctctttttatgcagtcccttcttaaactcccaaggatgcagagctggtgagaaaggaaaggtgcagaggatctggctgaggtctgattgagtgctagttagtactgcctagctctagccctgtgttattttaccttccctgtgtgtttccttttccaaacacttggggtgtggttctagctgagctcaaacaagtcatggctcttcagccctgcagtaacaggagtccagacttagtttactaaattgaaagcagaggcagttgtttggggtagtctgaaggtgacagacatcctaattaggtttgtggacagctagacagttgggagaggccagacgcagtttcaggaatccaacttgggcttcaaagcattgaatctccacgttttttctaacggaggttgtgaaatccatgtccccagatgagctttaattgataactgcagctgtcttgtgtgatataacaatttgttcagctgagagcaaaggatccgattaactcatctactgtgctcttgccagttcttcaactaaatgagactggctactggctatacagtcttctnnnnnnnnnnnnnnnnnnnnnnnnnnnnnnnnnnnnnnnnnnnnnnnnnnnnnnnnnnnnnnnnnnnnnnnnnnnnnnnnnnnnnnnnnnnnnnnnnnnnnnnnctaaccttccttccctcccatcaaaccatcagtggaaagggcttagactttgtggctggggtaggagaagattctcagccttgggtctgctgtgtgcactaaggtatttgagtcacagttatgaaaacatcctttagttgagccttaattataaagaagcaggaagggagttaaataaataccccaaactgtcaaaatgcccattgaagtaagaggtcttactgggtcaaataacctaggaaggtttttcttggcagctggcatttgttgccatgtgatagcaacaaacaaataaccatgcaagagaggcaggacaacaaaataccgtgacagtgctgccggtaagtactggcctgtgggcagtctggacacgttgagcttccatggtaagccgggatgaaaggtaacattcagaagacagggtcagcctgtgaccctgaagaagaagagaaggtcagaagtcaaaagaggagcccacctggactattctaggaaggccggggtcttaatttgcccctaaagaattagagagacgtttttcttgggagttccaagacctggattctagtctcagcaatgccagggagccactgaccaaccctgggtgagccaatccccactctccatccttttctccacatacatagccaagctttgttaactatctctaactgaggcatgaagaatgtggcctccatgatcttgcccagagtcaacagaaaaacaaacaaaaaagctcctggcataaaaacaatataaaatttaagatggatgcttccacaaaaggaacaggacaagagtggccaggaagataggagcagagaaggcagggacaggatgacagttgctagaaagataggaatggagaaggcaggaacaggatggcaatggcaggaaagataggcagagaatgaagagacagcaccagaatagagagatgggagcggaccagggaaggccagacttctgctgagctgtgacaaattgccacacatttagtgctttggaaaaaaatgaatcagccagatgtcctggcacatagctataattcctgcattgggaagcccgaacaataagatcatgagtatgacaggacagcttgggctacatgacaagactctgcctcaaaacatgagtaacttattcttctgttaacagttacatttctggatgtggaggatcagagcaggattcactgggtttaaatagaggtgttggcagagctctgtcccttgggaaacccccagagaagtcactctcttgctttttcctttcttagagctgcctgtgtttgttgacatgttttctccttctgccattttcacagtcagcagagtggcgtcttctaatttccttcttaagcttctcttgtgaccctttagtgtgtatccttgtgactatgtaaaacttacctggtgacccaggaaaatctcagactcccgtaattaaccattaatttaatcacacgtacagtcccttttatcactcaagacattgcggcatggaaaggaggaccattgttctgcacaccacacacacctaacagaatcatcacatgctatcttccatcctatagcatgtcaccattgtctacacagctcccaggcagatccttgctagcactataacaccttgttggccccacccctattccatagccaatacattctaaaactcaaaggtttcatttctagcatatatatctggtattttctttgtggaagacttccactatgcccttcatcttaccagtgtctccttcagagccttctattagtttctaccccagtttctccattgaaaagcaacagaaaagttaaacaaaaacttcttaaaagtctgagtcatgctgtatcctgctgaaaaaacttaacagcctcactattatcagatgaaaaacaaaattccaaatgttctacctgaccctcagttgggccgaagatgatggtgcctatggtgtttctttcaatgccttgctctcttagctactaagtgcttcagtggccatcaatttttccctcagtggccaagatttctgttgtctcagagcctttgcacttgctgatctcactcacccatctctgtgttcctctgtctttgcacctcatagaaagcatcactttctcagaaaagtgtttggcagccctgacccacttcctagtcacaagcctggaacagacttctctctgcagtgcttgacagcagcagtgttcccatcagctagagctgcccgtgttttttgatacacgacccttccatcttcactcttctgagaagcatcttccttgatgttattccagtttaaaattaaaaacctgtgtgattgttagaatgtttctcttgatatttctcatcttgtattgtctacttctcatctatgcatcaaccacagtctgatgatatctaagacagtatgagtacttagtatgtgatagatggatggatggatggatggatggatggatggatggatggatgcaaggcgtgaggtgctgtataaaaagatggcttaaaactcagtacctagagtctggtagactaaagtttaaatcatagctttgccttttgttgcttatgtgatttggaatctggggcaaactatctctcaactctttgggttaaggccaaggatttgcctttcagttcttatatgataagtcataatggagttgatgacaaagattacaaataacaaagatttgagagaagcaaaccaacatcaggaccaggaggagtgacaacaatcgtctcaggacctttctacatgttcctcttgcttagtagctgtgtctttcatgatcttgaatataagcgatttcaaacttctcccttaggacttcttggacctactttatacgctgaagttggggacgtcattaaagttcactttagaaacaaagcagacaaaccactaagcatccatcctcaagggattaaatacagtaaattttcagaaggtaagatgaacttattaaccctctgacaggagaagaagatcactttaatatcattgctaaatattaagactggtgttgttaaccatacactcttagagaaaattcttttcctgaaaattgtaattataaaaattgaactgctttcagtttcagagaggaaaacaaatggttttagagtcatctaaacactgtgattgtgttaggttcctgttcctggtaaggtgggttggaaaattacctcatgtcaatgaatctctccattccatatgttcatcttaaagtggaaataacaatacattctaggatggtttaagacagattcgatgtttccatggtaagtacaagcaagactcatcaccaggcggataagtgcagggcaaatggattgtgcttgaactccatggccactgtgcttcccttccctgctcctgtggcttctcatgggcataaacaaaccccatggtaaggcagggtgagcaaacatttttttaaagccagctactaaataaattaatacactcggctttgcaggcaataagatctatgctgtcctggaaagaggagtttccagttgaggagttaccttcattcaatttgtttgtgagcctatttgtggagcattttcttgactgttaactgatatgggagattctagctcactatgtatggtactatccctgggcagtgagccccggctgtataaagaaaggaagctgagcaagccagggcaacatattcatgagcagagttctaagtggtctctgctccggcttctgccttgagttcctgccttggcttccctccataatggatggtagcctgtaattgaggcaaacttttggtcagtgttttatcacagcaacagaggaagaaatcgggacagttggcaagttcctggatgagacggggtgcccaggggtctcttctaggttccccagattcatacagtgatgagcctacttactgggtttctaaactagagctcagccatacagagtaggatagagcaacatgcccacacagtctctttcaagttccactcccagcgtgggagaaggtaagagttgtggactctgcccctcagctcagctgtttgcagagggaatggactttgtgacatcgttcatcctcctccaatgtttatttgatcccccattactcagtcagcaatcactagtgagataaaattatcgaaaatgtacccacacatctgtgctagcacatatagcattgcatatgcatgcctgtagtcctagaagttcaaaataaaaatggtaaatacagatatgtgcgaaacataaaaaaaaaaaaaacttccctagaaaacaatatgtaatcttagttcagagtttctttcatgaagagagaagtctattgtgtcacgcccctctgtgttaaaatacagtctctccgcatctgtgtcagcactgaccgttgcctattgtctacctctatagttagacctacttttgtgaggataaactagctacatggtgagccagctctatgagagtccaaattctttctcccaggagtaaatgttcaccaggcagacagtgggggacagagataacagacataggtttgagagtctatggttgcaggtagcttaaaaatgggctccctcccctgtttgtcagaacacacaaactgacttatagaaatacaattcctttctaatggtattttaagctttgtatcgagtctgggaagacagctcagcaggtacagttgcttactcaacaagcatgaggacatgaatgcaaatttccagaactcccatagaaagcacctataacatccagtgcttggggaaggggaacatggggggtggagagagaaggcctgtgaggcttgctggtcaccacctgagcttcatgtttactaagaatctttgtctcaagggactaagggcaagagtggccaggtcttcaggtgttctctggcttctacccatgcacaggcaagtgtacctgctcatgtgcatattcaacacacacacacacacacacacacacacacacacacacacacacacacactactttaaaaccccaattttctgtcactaattttaatctgaatgaaattaatttgatttccaaaaagtctataaatagcatacattacactaaggttaaggtcatgaaagatttttgtgatccaaagactttgaaattttgagtgattgttttaagaaagcctgtttcatgataaatcttaatattgctgttgttctttcttctctctatctttctgtctctctccctctccttccctctatgtcttcatgtgtctctgtctctgtgtgtctgtgtgtgtgtgtgtatgtgtgtgtgtgtgtgtgtgtctgtctgtctgtgtgcatgtgcacactaaggatgagacccagtatctcaaaactgctaggcaagcaccgtcccactgaactccattcccagatccttgatattattctttcatttgatttatattcttgatctatctgtggagttgctttgtactatactacaaaattatttttagacttatataaaatgcattaaattatatttaatattaaaattctattacatttagtcacctactagtaagctagagtcctaaacttaaaaaaaaaaatccaatagagcttttattttgcatctaagtactacaaaattctgtatatgaaaagttagttctcggctccaacatgcccaggatcagagaatcagaggttaggaggacacaacatctgacccaacaccaggagtaactgggaccggtgggacccaggcacgcaggaactccactagaccagtgatggaggttccttccagtctgtctgggctggtaccctgagcagaccttgggcgcaaactctgcagccagccccacaacaccccgaggcagctccactcccaggcactctaacatacccaggatcagaggatcacaaggtcccatgaacttagtcacaccagaatctcaaggtcccaaaggcagcttgactcccaggaacttggacacacccaggatctcaggatcacaggatcccagaatcacagtatcacagagacagctcgactcagaggagtgctgacacaaccaggatcacaggatggacggctccagtcagatatagccagagcaggtagcactagagataaccagacggtgggaggtaagcgtaagaacataagcaacggagccgggcgtggtggcgcacacctttaatcccagcacttgggaggcagagacaggtggatttctgagttcgaggccagcctggtctacaaagtaggttccaggacaacaacggctatacagagaaaccctgtctcaaaaaacaaaacaaaacaaaacaaaaagaacataagcaacggaaaccaaggttacttgggatcatcagaacccaattctcccaccacagcaagtcctgaataccccaacacactggaaaatcaagattcagatctaaaatcacttctcatgatgatgatgatagaggacattaagaaagacataaataactcccttaaagaaatacaggagaacacagataaacagctagaagccctaaaagaggaagcacaaaaaccccttaaagagttacaggaaaacacaatcaaacaggcaaaggaatggaacaaaaccatccaggatctaaaaatggaactagaaacaataaagaaatcacaaagggagacaaccctggagttagaaaacctaggaaagagatcaggagttatagatgcaagagataaaaggtgcagaggatatcatagaaaacattgaaacacaacagtgaaagaaaacacaaaaagcaaaaatctcctaacccaaagcatccaggaattccacgacacaatgagaagaccaaacctaaggataataggtatagaagagagtgagaattcccaacttaaagggccagtaaatatcttcaacaaaattatagaagaacacttccctaacctaaagaaagagttgcccatgaacatacaaaaagcctacagaactccaaatagactggaccagaaaagaaattcctcctgtcacataatagtcaaaacaccaaatgcactaaacaaagaaagaattttaaaagcagtaaagggaaaaaggtcaggtaacatataaaggcagacctatcagaattacacctgacttctcagcagaaactatgaaagctagaagatcctgggtagatgtcatacagaccataagagaacacgaatgccagcccagactactatacccagcaaaactctcaatcaccatagacagaaaaaccaagatattccatgacaaaactaaatttacacaatatctttccacaaatctatccctacaaaggataatatatggaaaacaccaacacaaggaggaaaactacaccctagaagaagcaagaaagcaatctttcaacaaactcacacaaacataattccacctctaacaagaaaagtaacaggaaataacaatcacttttctttaatatcttttaatatgaaaattaatatttccagcatatcctaatcgattgaaattcaaaaacatgaggaattagaaatttgtcagctgtcatactgtggtctctttaatttggtaatgggagaaatatgtccaatattatacaatccatatacactttctgcctgttggcacatgacagggtcttgttgtgtgccacataatggtcttgaaatcatgcttctcctatctcagcctctctattagtaggattgtttatttgatgtttttacactatactatggttttcagaacagcttacaaatttcaaaattatttatacagccaaaagaaatgtagacaattaatttgggaggtggcttataagagaacagcaaagagtgagactgaaggctttgcttgatatttataattattgtatcaattttgaagaagaggactttataaataactcttatctgagatgaatgcttttcaaaatcatcacagccaatgaaccagaaccttaccctcacctaacatctgtgccaccctccaagcagaaccattgttcattgaaatagttgatgaatgacttcatggatagatcatcttaatacacacaccatttcttaaatgaatgtaacctgttccctgtgggctgagaatgatgacaatcactcaagtcaaatagctttgactgtagcgggaaatctgtatccaaaaatcgtgcctacaattcattccttggtgtagcagaactgtcaactcttagcttatctactatggaggtaaaatcctttggtgatgtgagggacattcaaatacagacttattacaatgcactccaatgtccaaaaactgttcttattttgtgtgtgtaccacagtaagagccaagattttaagctctactaaaaacaaagcaaacaaaaagactttatttatttatgctcatttcagaaactaatagtgatatattattttaaaatatcatacagttaatatatttggagtgatttgaaatttatattgagaaaaacgtgtgtattttcagtattgctgtagacaagcatctacataagactgttcaattgattgttgttttatatcaaactacttttataatatttttattgttacaatattttataaattttaaagaatatgatacaaaatgaaaggtattacaggttttgaaggggggctctccgggaggagttggggtacaaaaaggaaaaaagaatgtgatgtaagtctatttactcaaaatatgttttaaatgttaacacattcagaaaagttgaaattatgtattgtttctcatcataatgctataaaacttaaatcaaaaaaaaaagttagttctttagaattttcataacattcaaaccttaactcagtttattttttaccaagtatgaaacaaattataatgattaatataaaagttctcataaagcacaaaagcagcattttccattttaaaaagccctcatatgtctacgcagcgaaatcaaattcattatacaaaaccagcattaatttgcccattgttcaatttatagcttccaaatgactgttctgtttctttgcatgcacaggggcattcactgtgtttaataaacaggagggggaaattcacacaagagtaataacagctaatgcgtgagtagcccgaaggataacagaaccttacagaacttcacttttccctgaagcttgcatgcaccacttagcacttaaaaatgtactggggggtctctctgaaaataattcatacagcatgacagggataaactcattataaagttgactggactgagcaagaaagaactgaacagaactgagcagatacaaaatgaagaagacctcttgtgtaagaagtttactctgccacaggatggacgaggacctgtgtgttctgtcacaacccatcctgtccatttctcttctttccaatttagaattttaactttatttggattacaaagtcaaaataagatttatttaaaaaaaaacacacttcaaaaatgcttcctctaaaatggctgtttctattttatttcatattgtgtaggttacagaatgagaaatatagcacttgtgttttattctggagaaaaaatagtgtgcaatgaaaagaataaaaacattgataagttatcttctaatacttttaatgatagtcctgtgtgtactcacagaatactttcatcccatgtacaaatctatattgtttgctatatgtttcctggtgcccacaattcaccctttaaacaattaaaattaccattcaagtatacaaaacgctatcgtacattatattgagaagtggaatttttcttttggatatccatttgtgttgccatatcaaccttttcagtacctgcatgcgtgacacagaattctgttttgtacggattttaaaactcactgggagttacagttgagtgtgagccactaaactttcacaaataaatttgatgacacaggaaaatcagtcaaacacctagaaggcaattcttacataagttcctcttcaggacaggcagtatagaatgctatgattatagcctccgaattgaatagtcatggggaaaaaaacaggtcaacgccattgcaagcatcatgtgtttaccctggtctcttgcatctgcacctggcatagagcccaggatgcttggggtggtggtgaaggccgtgacaatcattgttgaactaaactgaaggaatgaggacttatgagaaacaaggacactatattatcctccctgcgctcagaaatgtattgtcagtgagcataagcagttatattgtcttattaccaattttcctcaccctaaaatacatacattactgatgtagattccatgtgtgtgtcttaattttttcacatgttggaaacctgatccttgatgagaccatataaggggtgggacctttgggtgggactcaagacatagagtcataaccttcatgatgaattttgtacccttagaaatggaacttagggtgaagcgccttcagcttctatgtgcctcctgagaacaagatgaaatgaggtcccctgtaccaaggagggcttcatgagagcactgtcatgttgaaatccatgtctcgccttaagatacatgaagaatggcttgcttagatgccacccaagctagggaactctgttatagaagcctagaaccaacccaatctagtctttctcagatgtgttagaacacaagagcacttgaatattttttcatctaaacatagggtcagatctgtaatgctcagactcgagaagctaagacggaagaactgtgattgacaagacagcttaggatatgaaggaagaccctggaaaccctgtgtcaggaatacaaacagattagactctctctctctctctctctctctctctctctctctctctctgctgtgtgtgtgtgtgtgtgtgtgtgtgtgtgtgtgtgtgtgtgtgtgtgtgtgtgtgtatgatagtcctcataacacataaaaaaactatctctagaaaaggaattattttaccttaatttaagataaagggctttaaaggaatattaagagcccttgccaagttgacaggagtacaacccaaaagttttgattttgatgtcaaggtttgtatgccttctccctcagcctagcagaaaagcctagcctgtcatgattcatataatctaacgaatatttaatcataaattgtgataagaattggctcaatgtgtaaaatgcttattacacaagtgtgaggagaggagtttggatccccatcaggggatgtggctatggtggcctcctgtaatcccggggcttaggggttttaggaggtagagactggggatccttaagtccagctgagtatctaggtctctggtttcaagtaagagactctgcttcaatataaggtggaaaccattgaggaggatacctcatagcaacctctaggcacatgatgcacatgaacacacatgcaatcatacacacacacctgcacatcacatatacaaaaacaatcaaataatttaaaaaagaccaccatcaccgtgtagcatagaagtcagaggagtgagtcagaggagtgagctgtatttaatcggacatctaaaagataagcagacatcttatcagacaacctcttaccccacaaaataggccaatttctgcttttggggagcctgtaaagacagaaggaagatgctacttcccactataggaatcccctgtggggttgcagcagctaggacagtggaagcttcagttcaggaaatgccatgtcttaagccatgaagctgtggaggaagagtcacttagtaaagggcaggatgcacgcctcatgcaggacagctggaggaaccacaggcctactagttgttgcagaaagccagaactgggagagtggtccaccttatcagtcctgtttgtgtttgcttcagagccttcagagataaagttccccatttgtcctttgagatgcttcctcagagacttttctattgacagttcacattataactcacagaaaattacttaagattttctcttttcatggcccctgatcattgttaacattcaaatcctgtttattgctggagtgggagtttatctgatagtaaatattaggtattagcgttcaaacttttatggtgggatagatgtaatacactcaattgttgatttttactctagaacaagagtcatggtctaaggtgtgagtgatagcgaggtgagtagttagaccaaaaaaaaaaaattattgtaatggacactagtgagcagaaactaaacaaactacctacagccaagactccagatcagtcagattttatgtcagaatttacctatgcccccagattgctgagatttgcattttgtttgtttttaaaagagcaatcactgatgtagggtcctaaataatacatccagattttcttatggcatttaatttgttttcatattgtgcaatcctaacagattttagctatgagttggtgacctttcagcaaacatggattgagcatatattccatgcttctcgtgtgctatggaagataccaaagatgctaagcatacatggtctagacccttcccttaaggaatccacactccagcaatcaaaatgtgcagaatgataatcattgtaacccagtcaaaaaagaatataccacaagtatttaattataaattgtgataagtactataaaagcaaatatatgtaaaacaatcagagataagggaagaagtaactggtatttgtcttggcttcagaaaggtgagcgtgcatttatctaaaggatgaaatggagcacgaacactctaaacagaaggaactgtatctgcagagaccctgagtgagatagcattgagcatgtccagggtacagggaggaggcatgggggatggatacatagtaaacggtaagaatcacatattatgaggtcagagagaagttgggtccacccatcatatgtggcattatggtcaatgtaagggattttgtgaaataagcaaatccagatataacttctcaactcttgcattgtgtggcttccatgcttagaatcctacccagcgtatctgtatacagcacagcagcaaacaagccccgccaccggagttgaccaaacaaggtgccttgtttctcactcatacctggagaactcagatgtgtgctgatgccgtcaaaactcatgccacattttgagtgcatagattttatgaagatggttagggaggttggcagtgcttcaatattaacatttagggaactgtgtttgagtctttccattatgtgccataaaggagagacaagtgtgatcaggagagagatggaagattagaaaatacctgaatttaactggaaatgaaagaataccaggtgatgttaacaacacattagagggtgtgaggaaattattacagcatattaatgtattttaaaaaccatttacataaaaaaatactgaagatgagcagaacactcacgaactgcgatataatgtcatgttaacgtgtgttgttgggtctcaaaagtgatggggacagtaaaagaacttggagggaaaaatagctcaaaacttttcagatgtggtacagactacagacctatgggtgaaggaggtctgacatgattccaccctgcccccaggctattgccaaggctattggctattccacatatctgatggtaaggctgaagatggtaattggtgaagatacaacctatttatgttattgaacatggagaaattgagctggtccccacctaactatcagtcacccttactgactaactaccagaggagaaataattatcaattttatccagtcacaaattgcaacctacagcagagaatgatctgcctgcaacatatactggtacaatagcggtgcaaatgttatggtagtaaccaaccacttcctgattagaggtggcagaaacctgaggctagatggatcacggaccctggcgataactactattattctgctaaaggaacagtaaagtgattccccatgacattctcctataaccatagatcagtgccttgctcattcatcatcagagaagcttcttcttacagtagatgggaactaatgcagagactcaaactagatgatgtggagagagagagagagagagagagagagagagagagagagagaaagagagagagagagagagagagagagagagagagagagagagagagagagagagattgagagctagaaagaccaaacatttctcttttcaaaagtgtaatcacttcaggaaaaaatagttcccactggccctttgcccataatatgaaacacttcaggattgtttccctatactctgatggtctcaccttcatgtcaaagagaaaccgtggcatcaactgatgatagagaaaacttcacctaattgagtgaagagtgtctctggcaaagaggaagccagtccctctcgattgcttaggaccctgacctctccccttcctgctctgcttgctccatctctaccacgtctcaaccctccaaactccttttaatctaggttcttcttcaaaagcggaagactaatttctacatcacccctttgctgcaggagggaatgcctggtatacagaggttttcaatgggacttttcacagtgaagcaaggcatctttaccctgggacagactggcttcataggcccaaggagtagactacatgcaggagctggatgcagggagcatcagggtggagaagagccagaaaggcccagtggcaaggtgcaactaagacaaacaaacaaacaaaaccagggctaaagatgattgccctggaaaagaagacattatatttttttcagagccacacaaaacagcatgcaaacagcatacacatctcatgctaacagtaagctagcatgacttgtaaagaactctgaagagaacatactgattcttgtattatgaggtggtttattgatgaaatatgattgagtctctgattacatgcaaacagttgttctaataccctgaaaactaacttggtcagccctaactagtctttgctagtaacaattatccctcagtgcattatggagtgtaaatatggggacagaggttagcgtatatggcatgtgtgtgacccctctgagaataaaagttgctatgaaaggcaagtgatctgcagagagctagatctcttgctttccccgcactggagagtggttgaaaactctggatgtctttgtggctgtcatttctccaggggcttcttacgcagaccacacgttccctgccgagaggaaggatgatgccgtggctcctggagaagaatacacctatgaatggatcgtcagtgaggacagcgggcccacacctgatgacccaccatgcctcacccacatctactattcctatgaaaacctgacccaggatttcaactcgggtctgattgggcctctgcttatctgcaagaaaggtaaaaacaatacctgcagatccaacgacagcaaagatgctgggctggctgggagattatatcgggctgaagcttgggagaaccttgataccttcctgtaggtgaggcaggagaagggggtggagatcaaatcatggctaagagaaagcagcacttggtactggctcttcccacttcttctaaaacctcccttcattctgagtcatgacaacttccttcaagtctactctgacatcgtgcctgcatacttgtaggaccagtaatgtttacctcagagccaggtctatccattttgaagtgtacaacaccctagttactgagagagtttctggaaatgacatcgactggtccaactgacatagctgaagttcctgttggtggtgattaggtttataaacatgtataactctactttcttttttgctgttatttggttgaaggtgggttggttggttggttggttagttggttggctggctggttggctggttggttagttggttggccttttaatgtttttagtagaaagggccttgaactcagtgatatttctgccctagcttccctagtggcagatcccaggtgtgagtcatcatccccagatcagccgatttcttaaaaacaagttgaacaatttaggtgtagttgacagattttgtgagtgttgacttttgcccacctatgtagatctgtgtttgtgaggcttgggatttgaggcctttaaagaatggatggactatagtctaatgctctagacaatttcacttccgttttagtgtgctttgtgcatgaatgaagcaaagcaatgatccaagggaggatgtctgcgttcagaaaaacatgtaaataaatgctagtaagtaaccctaaatattgacagagcagctctttcccagagctttctcaggacagaccaacttaaacacaattgcctggcacatatgtagatagattatatctgggaaagcatgaaagcgaggcagaaggccatattcagatttggagtgcactgaccagattgggttctatagctatgttctgacatccagcaaggatagcatgttttataagttgaaggtaagtgtttgtcacaggaaacataaaatcacatctcagaacaatccagggaacaaagtgcacctgagctgaaaggtcctcatcagggcattgttcaccatggggcagcctttcgactgtgtcccgacagtcaggaatcccattagctgtgcttcttagaaatacacttgatttctcctttcttccttctcttactctaagagacttcaacccatctttcattaaaacatccacagaaccacaacagactgtaccctggagataatgtcatttataccgatacacagatcatagacccagctctcttattcatcatgcaaatatatttttaaatttcctgacatataaaagattctgtgattgcattgggaaaaacaatcttatacaaggcactttcatttgatcactgttttactcatataaatatggattcatcttgatacaaacttttctctagtcgcatgtcccatttaatgaggaagcttcattcaacacaagttatgtggtctggtctaggagactggaagaaatggggtttttcattgttgataatgttagattttgacttttcgaggtaaactcttagtagtccataatggatttgaactccctatgtagcccatctgtcctcaaactcatgatcctcctgtctcagctttcctgggtcctgggattataggaatgcatcctaacacttgactgggaatgtatgattcaaatttatatcaacattacttgtttctagcctcaacttcagatgtatgagaacatggaaagtactctttactcttccgtctggacctggatagaagcctatcttttctctctcaggcaccctgaccgaggatgggactcagaagatgtttgacaagcagcatgtgctcctatttgctgtgtttgatgaaagcaagagccggagccagtcaccatccctaatgtacacaattaatggctttgtgaataagacgatgccaggtaatacaggggccaggcaccattcagcaatgacagtgtcccgagtgtccaacgttggtcctgttctttctttaaggcagaagctaccgtgttcactggtttccagtgcctagtggtgaagaatcacaatcttctgcaatgattcggggattttcatgattttatcatcatttctgtcttacccaggaagtacaacagataaatcagaagttaacaaggaaccttacttgatacagccttgttaggtgtggtgttctgagcatatcaatgtctgctcaagtacagagtcactctataacagtatgctctaccattcaaaaatctattgatgaataatgtccagtggcatgtaggttttctcttcccatctgcagatagaattttgtaagaaagtaaaatcatacaagctgttaagtgtgtgtgtgtgtgtgtgtgtgtatgacttccactgtactagctaattttatgttgctataacaaaacactgagtgctggctactatataaagaaaaaaatgttttttaaaaaaattcagtgttagaagcagaaagacctagactggcagctcatcagctcagcctttgatgagggaccacttatctatgtcacagtagggcagaagaagcaaaaagggaaatggctacatgtagaagaggctaagaacagggatggggctgaggcttgctttataataacttgctctcatgagaattaaccaaggtcccatgagaactaactgtattaatcacttccaggaacagcacctccagtatcctaaccaccttcctctaggctctatgtttctaggttctaccacctgaaattcatcacacagagtcaagcttttgtatatgcacctttgaggagacatactgtaaccatagcaaccacttatctcacttctcttttctgtctttctagtagaactgacttacaatgaaaaatccaattctagtaaaaaaaaaaaaaaacaaacaaacaaacaaacaaaaaaaacagagaagaagtggtatagatggttgctatggttatggtacgtctcctaaaggaggaaagcctagatttactctttccttgttctcatggtgattgggaaactttatttctctgtgggagattctaatcttgacttctattccagattaacatttcaaatttcaaatttacaatcaccagatacaagacaatgggctaagaattggtctcttaatatgtatgtggtaactgtacacacagatacatcccataatatgtatgtatagatatatcccacaattatatatatagtatttatttatgtttagtgtaggaaaaatgaaaatatttcttgattaaaaaattctgggggctggtgagatggtgcagcaagcaaggatggttttctccaggtctgatcatctgagttggatctctaagaacctcatggtgcaaagagagaaccaaccttcacagatcgtcctctgacccacacacatgaatcatggcattcatgcccatgcccatacacaaaataaataaataactgtaaacaaaagcaaaaattctaaatttcgtcatgtatcaatatcaccaatggcttgtcttacagaaaaaccaacattgtcaagagtcagggtctgatattgctttcaatctttattttatttcatttggtgccatcttctgccagtctcatgcagctctgagtattgattctgagttccagaactaggctcctgcaaacctgagactgcactaactgacctccaaattggaagatctgaattcgcatctcattcctttccctgactctgtgtggtccttaccaactaggagtcttaatatgctgttcccagaaatggaatcaacaatcccactgtctgtgtcctgacagggagaataatccatgtaaatttataaaagctgaaatagtggactgaatgtgcaatatatacttgactgaatgtgcaatatatatatacttgattgggacagagatattataaatttgtacttgaaaaaaaaagagtagcctcaaataagtgcaaacccttagtagacacaatacttatgctgataaagccccgagccttctagaataacatacactaatagatgtgacaatactaccgtagatgtgttcattgctgggcagctcagtgtgggctgtttctgcgtgggataaacacacccgcaggaacacgtaccttctagttccctcccagcctcctgtttgcaaggctttcacaaaggacaaatgcctctatggataagaagctaaatcccagaccatcctcttatatctagtgattagaaatctgggtaggagccaggactggactctctcccagagcaaataagcattttttctcaatcactgtggcaacaaagaaagcaaaactgggctttctccttggttttcttcctccgttgttagcaatctgtcctcaaaaggctctcagtgtccgcttacaaagaggacaccagtaacaaccgagaaatcccttgttactaacataacttcagaaagggtaaagacagtaggaaatccttcagcacatcctcacactttcttctactttgacagagcttggtctctatttgcagaagaggattaggtcctggcacccaggcctattgaaggtactggggacttcttccaagtgaggccagatgggtgtgaacagttactccattttacccaggactttatcagtctatacactgggagccctgtgtcctgagagacctctaaatctagacaaactgggatagtgcatcacatgcttacctgcctcctagcctttgtcccttagctgtctctgcagctctgaaggaatggcccccattctaaactctacccctacacacacagtttgtgctgctacttggtatgtgagtggtgactccttgtttcccatctctctgtttggatgatgtctctccctctcagatctaacagtctgtgcccatgatcatgtcagctggatgtgtatggctgttgtctctccctctcagatataacagtctgtgcccatgaccacgtcagctggcatctgatcgggatgagctcggggccagaattgttttctattcacttcaacggccaagtcctagagcagaaccagcataaagtgtccaccgtcaccctggtcagcgcaacatctacgactgcaaacatgactatgagcccagaaggaagatggattgtttcttctctcatcccaaagcattatcaaggcaagaaacctttcttgttgtggttaaaattaattgggggtttctaccccaccttggatcatttagttcccaagttcccaggtaaaagacacaaaacctttatatttataataagccttaacatcactagagctggacagacatctaccccccatgccattttgtctacttccctctccgtgaccctgagatatgacctgccacgttctccctgggctgctcttcctgctcttactccaactggccagacctcacagccatgttctcataactcatctctcccattgtttcttctcctccctcttcatcttcctgctctcctcctcatgctctctgccccagactccaagtctgacaaccaaagccctgcctatctctcttctgcccagccacaggctgcagacatctttattcaaccaaatgttttacattaaggtgcaaggttacctagcaacccttggtgaggatctccttgtccctcgggcaaccagagctggtagttagcatcacaacacatagcaacagactaaacctcaacaggtcctgacagtgttgcgttgagtgagcaccattgcttctcaggctactaacttatttcttctcctttaccatttagttgaccccacctagacatgggcatcctggttcctaagacaccattagatgctttgctcttagactcaaaacccactaattggggatgaaggaggtgcaggcattgacaaggacgttttaagacaaagcaaaagcttaagaggtctctacttccataacggaggaggagaactaacacctctctgaatgtgttcttggatgtctttcatatgcagccaaaggaaaggaacctagaaactagacagatgaaagtaaatatccacaaatttatagaagtacagagctaccaagactgaccaggctaaacatgataatatagtcctgtgcaatgagatgggcacaagatccttgcacagaaaagaactcaatcaatgtgtgttgaatggatcacaaatgtttttattttctgttttattgagataggatcttctgctgtatgccaagctgtcctaaaactcaccataaattcttagctggctttgaaatcatggtaactctcctgtctcaacctctccaatgtggggatcataggcatgagccatcacaccagctagaaatggacttcagagagcatcagtgaattctggagcggggcggggcgggtgtgtgtgtgtgtgtgaagaacccagcagtagtcatgtggtaccatgtaaattaaacatctaactgtcatatcacacatttttttttcctttagactattgagaagaacattcatcttgctagagatgaaaatctaagcaaatctattaccgtagaaaaccatttatcacaaccaggtgtgtgagccctggagaaactaaatactgtatgagaacattgtgttttcacactgagcaatcaagactatgatgaaatgatgatccagacaaactatctcgagtagttactaatagaaataaagcaaaaacaaaactaaaactgcagacaattgctattatgcattattatttaataatcacactaaggatacactttgatagtctccatttaacaaagggacgaataacaaggaaagacaaaattaaaatgatgtcttgttttatatatatataaagagaaacagagacagagatgagagctgtgttaaggatcaaaccgaaggccacctacacactaagcccacacttcaccatttcaccagccctaggcctagggtttttagtttgttcctgctgcacacaaaacacagagaacctcatcaacctttccctctgaccctctcctctcctcctgcttctgactcttgcctccttctgtgacccattaaaagagtccagactagcatagccgaagactgtctgagcattgctgtctcctgttattatttgcctccagtgaattgatttttttaaatacacattttgatgaataattgtttctctcaagttctacctctgcctttatattctaatccagctgggatgcaggcttacattgacattaaaaactgcccaaagaaaacgaggagccccaagaccctcactcgggagcagaggcggtacatgaagagatgggagtatttcatagccgcagaggaggtcatttggaactatgcacccgtgatacctgcgaatatggacaagtgagttggggctcagaccgccaagtcaagatcaaaggcatggcccacagggtccttagtgtgtgggtctcaattatgatgtcatgagtggccagctcttaaggtaggtgtgcattggtttccacctaggcattcttatcctctgagacattcaattatccccaagtccccgtggggatgtggcctgatgatagcaacagggacaatggcagctagaacttgttgaatgcttgccactgctaacccttgtagtaggtgtttgctaagggtctcacatcagttctacgagcacagtgctgttcttgtgttcccgtgttggagggaaggtgccagagaagctctagtaactcttcatatgacattcctagtaagaaaaatgagagtgaacttttactggggtgctactctgtacctaacagactggcaggttcatatcccaccatctgctgttgaggcttcagaaagcaaaagctatcacacacattctggtggcccaatgtgctgctaaagccattccgtgggataacttggcaaaacgggttagaatggtaaacacatataccctttaccccaggcactgtgctcttggaattcaatggtataaaagtgttcttgttcacaggttagaagatgtatgaaaagggtgctcactgctgctgcgatgttaccagtgatacaagattaaaattaactccaaaagtccttcaattggaaaagagtaccaagttatagcatattcatacaatggaatactatggatccaataaaataggaaggaaggaagggagggtatagacgtgctctgtccctgtagctacttctcttcagttacgtatggcttatccagtggcagaggagatgactcctggttgctacatggaggacatcaggatgcaaactacactcagactgttcccagaagtagcattttagcaagcagcacttgcacgcacaagggtttccccgtcatccattgcactggactcgctgccgctggaagtagtctaacctttgtttcattatttcatttcccttaaagaatttacaggtctcagcacttggataatttctcaaaccaaattggaaaacattacaagaaagttatctacaggcaatatgaagaagagaccttcaccaaacgcactgacaaccccagcatcaaacaaagtgggattctgggccctgttatcagagcccaggtcagagacacactcaaggtaagcaacagaaatacggaagcaaggaaaaattaaacagggaaagacagatcaagggactggcagttttaatatatttaaatgtattcatctaattataaaatcaaacatagctctcagttttatttagcatttcattcttgtatatcctacttaatttaaaagatctgggatcgataaagtagaaaagaatagagagaataaagcagagtcagtatcattggaggagtaaggaatactatatgggaactaattccatctggtcacaaataagcataatgagacacacccatacatccccaaggttgtctgcaaagtgtgtcccaactcttatagcaaagtaaatatgaccgagcaaggtgcacacaccagtgaatgcagcagttcgcctggggtagagagccaggagaactttcttgccctgggttttcaagtcagtgtccttgacaaaagccccacaagtgtcgcagaacagaagtcctgagcggctttggaaaatgacattgcccgttaccagtgtgagcagttgactcagcacagcggagaagagataaatctccactccagtctcagtgtgtggcgctaatggctggtctccgatttatactcgcacaagaccctctggctggcaagatggctcagtgcatagaaccaattgatgtcaaacgtgaacacctgagttcatcacccagagtttatggtgggaagagagaatcaactcccacagattgtcttctgacctgacatatacatacacaacaacaatttaaacaatttctttaaagcctgaaactttcatcaaataattaccttgaacgttctaccatatcacagagctaggtagggacccagacaattgaaggttacactgattggcaggaccctaggatatagggtcttgatgttgactaatgattattcaaaggctttggcagcaaaccaagatgaaggtaaggttaaggttgtctcttgaagattgaaaggctaattagaacttctaggaagattatgccctaaacaaaacccattttgttcatttgaaaatggacagcgtcttccttccctgcgatccgcccctcatttttggctccactgggatgcattagatttcagtgtaagcatagtctatctgaaactcagggtctggctactgcggccattcaggaagttaacttcaagaacaatgatcctgggaaacaaaacggcattgtggtctagaggagagcaggcacagaggacagatgcatagatgcagtgcaatctgaaagaagaagggaagggtgtggggaccagctgggagagggtgaggggttaggaggaatccttcctgtcgggtaacgagggaggctgctgccgggataaacagaactgattttcccactgctgcactgcacatctgtgtgtgcacacctgtccatacatgcacacacaagcagctgccttcatctcgtctgaaatagttctcatgagtgaccttaaacacggaaataataactatgacttaactttctagatcgtgttcaaaaatatggcgagccgaccctacagcatttaccctcacggggtgaccttctctccttacgaagatggaatcaattcttcctccacctcaggtgggaacctttcacttcttggagactactgatctccgagaggcatccacagtgttctcttgtatttgtccagtggttatgacaaacgcagtcattaatacggaagggttatctctcctttctgagtgtcattggcgccatctagtggacagatattgaacagctacatgctatccatagtcaggagttttaatacaaaaagaatatttttcttcatattaattactctaaataaaagctaaggtagatatttattatgatgaaataatttttctaaaaattaagagcgtatattttcttccaggcagtcacaccacgatcagaccagttcaaccgggggaaaccttcacttacaaatggaacattctagagtttgatgaacccacggaaaacgatgcccagtgcctaacaaggccatactacagtgatgtggacgttacaagggacattgcctctgggctgatagggctgcttctaatttgtaagagcaggtccctggaccagagaggtgtacaggtattttatacataacataaccttaaaaaaaaaaaaaagaaagaggaatttcccctcgctggcacagattaggtctcactacgggataggaggatttcccttctaaaacacaccaatcattagtcttctttggcaacagtgtggggatatttacacacatctcgcatggtgtccccgtttctctgactcctttcctctggactctgactgcagaaagcacatcccactggattgtattttagactcaaacctgttgactgtgtgatgaagaaaccattgcagctcctttaatcctttcctctggtcaaataggcaacaatatccctcctagaaatgtgtttacagggtggcttaggagctcagtgagaacttggcgccaatctccgctcttttcagaggcaaacatcagaggcgggagagagcccccgggagcaaggacatttggagccatagttttagtgaagtttgagcctgccaaaagcccttctttggtgaaactaagttatgacaaacaatgtgatcaaagagatgggatttctgagttcacttttattttgagacatggcctcaaactcactcttgtagtccagaatagccttggactttttaaaaattgtcttttcttatccttccttttcttttctttttatagtttaggtttatgtgtgtgggtgtctcatgtgcatgtatatctgcatacagtgtgtatacctagtgcccacagaggacagagaaggtgttagctagattcccggtaactatggttacagatggttgtgagctggcacgtgggagatgggaattgaacccctggtgccctgggagatctgccaatgctcttaaccatttgagccatctttccagcccaccccctgttttatttatttttttgttgttggtgtttgcttgtttgtttttctttttgttttgagacaggtttctcttgtaattcaagcaggcctcaaattggttatttagtcaaggataaccttgaaccttggtgcctcctgagtcccaggattagagacgaatgctactgtacctggtttactggggtactggggatcaaacttggggctttatgcatgccaagcaaatactttagcaactaaagtatatcctcagcagcctgagtttattctcattgacaattcatagtctcatattattccccattaggctaattcctattaggctaagtaatattggaagaggtcttatccaaaggcatgcaaaataggcagatgtctagaaaaatcagaaaatttgcaagatcctgacttactgaagaagtaaacactacttggaaggctgggtgtggtggggctttcctgttgcagcatcctggccatccctttcgtccatttggaacacggtcagtcagccattctgaaaagttttccattactctgacctacaggtgttatactaagggaatttcccccctgggtatttttgactgaattctctgactccttctctttgtgttcacatattagctttatctctgacaagggtttggtaaatcatggcctcctaggtgccagacacgtggctcctctggaccccacgacaatggggacatcggcagcccaccagagcagtgatcactgccctttcccctgcagagggtggcagacatcgagcagcaggccgtgtttgctgtgtttgacgagaacaagagctggtacattgaggacaacatcaacaagttctgtgagaatcctgatgaggtgaagcgtgatgatcccaagttttacgaatcaaacatcatgagcagtaagtcagactcccgtgtccacactgggggtcgcagtgtgtctgtacccaaaggaaaaaaatgtgatgctgggcataatcctctctaatggcaccctctccctctcctctcctctcctctcctctcnnnnnnnnnnnnnnnnnnnnnnnnnnnnnnnnnnnnnnnnnnnnnnnnnnnnnnnnnnnnnnnnnnnnnnnnnnnnnnnnnnnnnnnnnnnnnnnnnnnnnnnnnnnnnnnnnnnnnnnnnnnnnnnnnnnnnnnnnnnnnnnnnnnnnnnnnnnnnnnnnnnnnnnnnnnnnnnnnnnnnnnnnnnnnnnnnnnnnnnnnnnnnnnnnnnnnnnnnnnnnnnnnnnnnnnnnnnnnnnnnnnnnnnnnnnnnnnnnnnnnnnnnnnnnnnnnnnnnnnnnnnnnnnnnnnnnnnnnnnnnnnnnnnnnnnnnnnnnnnnnnnnnnnnnnnnnnnnnnnnnnnnnnnnnnctcccctcccctcactcacagctctaggacttattgatgggcttgttgaatacccctgggctaggcatattgaaaccatgacactgcactccctggtccccataggcttgttcaaatacatgactctatggggaccatgtttagccatagcataataaaaagtacatttagtccaacttccaaagtcccatagtctctagcagtctcaacaatgttaaaagtccaaagttcaaagtctcttctgagagctatccaaacacttaactgtaatccccaaagcaagacaggaaaccggctgggcaaactccaaactctgcatctccatgtctgatgtcaaagcagtcttcagatcttcaacaccttttttcatctttgttgactgcaacaaacttctttttctgggatggttccactccctgttagcagcattcttcagcagatagcattatggctctggcatctcaaaaatcttggggtctccaaggtaacttcaacattacagcttcttgtttcaatgtctgggattcacacatgatcttctgggctcctccaaagggcctgggtcacttccccagctctgccttctatagcattctaaactcagatggatccactccactgcctctgctgttcttggtgatcatcccacagtactggcatcttcaatacactggggtcttccactgcaactaggcttcaccaatagcctctcataggatctcttcatggtgccaagtctcaaattctttggatgacctcttcagtcctgggctatcaactacaactgaggctgcaccttcaccaatggccctccgtggactctcatagcaccaagcttcaactgttcttcatgactccttcatgccttcaaaactagtaccacctgggtaactcttacacattacaaaatacaactgctgcaggaggtacaaccttggctacctcttgaacatagcttttttgtgctttcattaaacacttcccagaagatttcacctcagtgatgctgatctcttcttaattatcactaatttcttagctccagctaaccggcatcaattgtcccagtagttccttctattctggactctaaagccagagccacatttccaaagctgctgagttctgctgcttgctggggctggaacatgggtcccttgttctattacaatatcacaagctttctgttttccaactccttcactacctaagcttggctgtcctggaacttgcttcatagagtgactttgaactcagagatctgcttatctttgcttcctgggattaaaagattgtactaccatgcctggacccaaagttagctgggtaggatcttgccctacggtcacttaattattcctttaattcagtttaacaaccttgaacacaggattcagctccattttacttcctggtacccatttaatccgcaaactatatattttgtatttttcctttctcagcttgctatgtttgttcaaaatgttcttcatgagacttaaacagagaacaaagtctatgatgggcatgtctgagacttcctttgccaatgcaattaacacgagtctcttcactttagcctcaggcagacacttcagataagggcaaagaagtagtcacattcttcaccaaaattccacaagaatggtctctagtccacatattgaaattttccactgaaactcttgggccaggtccacacaattcaaatcactctcagtagcaaagtcttccatattcctactaggatagcctgttaagccccatttaaagcattccactgctttccaaatccaaagtccccaaatccacattcttccaaacgaaagcatggtccggcctatcacagcaatactccagtccctggaaacaacttctatcttaattagggttttactgctgtgaacagacaccatgaccaaggcaagtcttataaaggatgacatctaattggggctggcttacaggtttagagattcagtgcatcatcattaaggctggagcatggcagcgtccagtcaggcatggtgcaggcagaactgagagttctacatcttcatctgaaggctgctagtagaatactgacttccaggcagctagggtgagggtcttaaagcccacacccacagtgacacacctactccaacaaggccacacctccaaatagcgccactccctgggccaaacatattcaaaccatgacacgtgtttgcagaagaatatgtatttatttgatccttaaagctcatgtctgtggagtccacctacatcttagtagccacttgtagccagtccatcacattaggccattaagcatagcatctggaatgatgtagaaactagtagcacacaccttcagcaactctacatgaatttggtacatagtcacttaaaatcttttttattttagtaccaagcatcatactaggactggtcacaatgatgacctgtgtgtatagattgtgccctcaaatgaattgtatcttaatgggatcatcaccctcagcacatatgcaaattaaaatgttacctaaattggtcttcctttaatagaaattaaaatatatgaactcaatactggagtggaaactgttaggtcaactgtaggttatctaacagatagtaggtctcaatgacaaatgtgctaagtgagcttctttgtgtgacattcattttactcatatctactatgccaagaagatagagttattatacctagacttgtccttccagtagatgcatcttgaacaatttaaatcaatttatatctgcttggtgaatgattaactaaatcaacatccacgaaaggcttgtcttcatcctgtctttttccactcagccatccctgacaaagctgaatgtggcctatgacctgctcacacattgttagacgttataaagcttatctttaataatcaccattttgatgccaccaaatgaacacagggacctggagatcattagatgtgggtcctcttgttgtacaggcctggcatttgacaactattcctccttcagctatcaacggctacgtgcccgagagcatttccactctgggattctgttttgatgacactgtccagtggcacttctgcagtgtgggaactcatgatgatattttgaccatccacttcactgggcactcgttcatctatgggaggaggcacgaggacaccttgaccctgttccccatgcgtggtgaatctgtgacagttacaatggataatgttggtgagtaagagtgtagatactgggagagctcactcatgggatctcaggtggaaaaggtctgttgagctctctaaatcaccaccactcctggtgtgtctcccggacccctgcaggcttgccttacactgcttcttgttgtttatggttgggagattagcttgcacatccctggaacaactgggcagtaaagacataccatggcagaaaagataaatgtaactatgagaagcagcataaagatattagccatgaaaacaacctttgatgtcatttctcaggtcttgtccaccttttgatgaagcactagcatagaatttgccaactagggtatagtgtctactaatcccaaggtcacacctatgtacacttccctggagctgtttgtttagatgtatttattttatgtatatgagtatactgcagctgacttcagacaccacagaagagggcatcagattccattacagatggttgtgagtcaccaggtggttgctgggaattgaactcaggacctctgtaagaacagacaatgatcttaaccaccaagccatctctccagtgcgccgccctacacacacacacacacacacacacacacacacacacacacacacacacacacgggagctgtctttacaaacatgggctaccatgcctagcttttaaaaacaaaacaaaatgacatggattctagggatcaaacttaggtccttgtggcagctgaaccatctccccagacccactttttaattcttagcagagaccatcccaccctctggtgaataatcattagataagcctcagaggctgtctcagagaccacattggcttataagacccaagttcaaaccactctctgccactcagtgtttttgcaactttagacaggttactcgccctcactaagccttaagtcactcatttgaaaagcaggccagtgctttacagagttgcatcagctcctagctgtaagatatgccaagtgcttagcactcaacacgcagttcccactgcagatgtcccagatcatccttagtgtgtcagtaattcactttcaatgtgactcaaactcactctgtccccctgtatgtcatttcctagaaatacttaaatatcccttttgtgtgaaaaggcaatcttatcaccatctcccaaactctgagtcttaggcaaattgtataactaagaagatagtcatgattttcaagatctattttatcatcaacccctgtccctttttattgatattttctaaaacagtgactcttgaacaatccaaactgaaggtctatttttctccttcatctccacagatcataaataccctagcctatatgtcactgatcttgtgaccttgtgaccttgtgatgccaaaacaatatcaagttacactttaaaaatttttctaaataccttattcctgtttttttcttttatgtcaccaaggctcaggaatttactactcatagaccagcctggtccatagctcacgtgtggctacctctggttaaaattcactaaaaaaatttttctccaacagatcctcctgtttttgtaacttttcctgagctttcagccttctcttctctgtctcttatgaaggaacttggatgttgaccaccatgaattccaatccaaaacgcagaaacctaagactgagattcagagatgttaagtgtaatcgggattatgacaatgaggactcatatgagatttatgaacctcctgcacctacatccatgacaactcggagaattcatgattccttagaaaatgaatttggcatagacaacgaagatgatgattaccagtacttactggcgtcatcattaggaattaggtcattcaaaaactcatcattgaatccagaggaaaatgagttcaatctcactgctctcgctctggagaacagctctgagttcatatctccaagcacagacagagttgttgactcaaactcttcacgaatccttagtaaaatcatcaataataacctcaaagactttcaaagaacacttcctggctcaggagccaccgtggctggtaccctccttagaaacctcattggcttagatgagaacttcgtcctcaactcttctacagaacatcgttccagctcatatcatgaaaatgatatggaaaatccacagtcaaacatcacaatggtatacctacttcctcttggtccaaaaggatctgggaatcgagaacaagataaacctaaaaccatcaagacaggaagaccccacatgatgaagcacaggttctcctggatgaaagcgccagctggtaaaactgggaggcattcaaacccaaagaattcgtattctggaatgaagtctgaggaggacattcctagcgagttgatacccttaaagcaaaagatcacttccaaatttctgaatagacgatggcgtgtggcttctgaaaagggtagttatgaaataatagcagcaaatggtgaagacacagatgtggataagctgaccaacagtcctcaaaatcagaatatcacagtacctcggggagagagcacctctcacacaaacacaacaagaaagccaagtgacctcccaacattttctggagttggacataaatctccacatgtaagacaggaggaagaaaacagtggttttcagaaaagacagttattcatcaggacacggaagaagaagaaaaataagaagcttgcactacacagtcctctatctccaaggggctttgaccctttgagaggacataaccattccccatttccagacaggagactacttaatcactcactgttactccacaagtccaatgaaacagctctttctccagacctgaaccagacctctccttcaatgagtacggacaggtcacttcctgactataatcagtactcgaaaaatgacactgagcagatgagctcttctttagatctttatcagtcagtgcccgcagaggaacactctccaacatttcctgcccaagatcctgatcaaacacactctaccacagatcctagctacagatcctctccgccagagctcagccaggggcttgattatgacctaagtcatgacttttaccctgatgacattggtctaacatctttctttccagaccaaagtcaaaagtcatctttctcttcagatgatgaccaagcaatcccttcctcagacttaagcctctttaccatctctccagaattggatcagacaattatttacccagacctggatcagttgctcctttctccagaagacaatcagaagacctcctccccagacctgggccaggtgcccctttctccagatgacaaccagaagacctcctccccagacctgggtcaggtgtccctttctccagatgataaccagaagacctcctccccagacctgggtcaggtgcccctttctctagatgacaaccagaagacgacctccccagacctgggtcaggtgcccctttctccagatgacaaccagatgatcacctccccagacctgggtcaggtgcccctttcttctgataaccagaagacctcttccccagatctgggtcaggtgcctctttttcctgaagacaaccagaattacttcctagacctgagtcaggtacctctctcctcagaccaaaaccaggagacctcctccacagacctactgactctctctcctgattttggtcagacagtcctttccccagacttggatcagctgccactcccttcagacaatagtcaggtgaccgtttccccagacctcagcctcttgaccctctcaccagattttaatgagataatcctagccccagaccttggtcaagtgaccctctctccagacctcatccagacaaaccctgctcttaatcatggacacaaagcatcctctgcagaccctgatcaagcatcctaccctccagattctggtcaggcttcatcgcttccagaactgaatcggactcttcctcatccagatctcaactcacatacccaccttccttcaccatctcccacactcaataacacttctttgtcaaggaaatttaaccctcttgttgtagtaggtctcagtagagtagatggagacgacgttgagattgttccaagtgaggagccagagagaatagatgaagattatgccgaggatgactttgtaacctataatgacccctacagaacagacactaggacagatgtcaattcctccagaaatcctgacactatcgcagcatggtacctccgaggccacggtggacacaaaaaattctactatattgcagctgaagaaataacctggaattacgcagagtttgcacaaaggtttggctagttttcttttacactctcattctgtgtcaccactgttatgaaaatcacctacaatatttcttctgggatgatggtgaacaaattatactttatatagtctgaccctccagtgatatttcctttgccatttccaatattagcttctatgctttagataacacccaggcaaaacaagaccattactgtggaagtctgtggtatcccatctgtccatttatgttttgtacctgtatcttgagagtcctatcatgaaaatccttgctcagagcagtgtctaaaatcttggggataattatgctttagcaaaatcaaaactcagaatagccactcttaaggtacaaggccacttatccgtcaaattattatacatactgtagaaatactataggactgttaaaggaaattactgggtggactatagtaatactatgtatgtttaataaatgagacttgacatagcccaaaagatcctagaaatcttacctaagaaaatatatttgagcagaaaattaaaacacatgtagtcacctgtgtttccatttacatatatttagctaattggtgaaatggttactaaatattctctgctaccaagcagattacttcttaagttcttttcaatttctttgtttttattttatatgaatgtatgagtatctgcatgtatgtatgtgaaccatgtgtgtgcctggcaccacagatgccagaatatccattatattatattatattatattatattatattatatattaataactagaactggagttacaagtggtttaatgtcccaaagtgggtgctgggaaccaaacctgggtaccctgaatgactgaactatcccttgtaaatttttccaacacttttaaatttcttcttttaaatgaatgctattgctgttgttttagtgaaatggaccatgaagacacaggccacactccaaaggacaccacatacaagaaagtcgttttcagaaaataccttgatagcacgtttacaagtcgtgatcctcgggcagaatatgaggagcaccttggcattctcggtcctgtgatccgggctgaagtggatgatgtgatccaagtaagtcaccatccgggccccctagatctccaggggacatgccacaagcaccaaacattgctaaggtggaggcaacaaaactataggtgattggcttcagaattaacatataattgtgctctttccccaccaagactgcttggctatttgacaatttttgagctacagaaaagcttttatactttttttttttaacagtgaacatgatttaatctggaagaaatagcactgaaatttctagctgaagccagcctgttttgagctaacatggaaaatgagtcaacagtatcccatggctgaggtggggacagcaatagcattgatttataaaaatgtccccattctttcttaagagagaagatagtgaaatgaaaggaaactagaaatcagagtaaaaatgtccctttgccctaaatgagccggtttcttaagtatcttaccagacttagtcattgattgctttcaaaatcctgtatccagttcccagacaatagcttatttttattgttctgggatatctgcacaaccagaattcaaattggaagtctttatcaagcaggccagcgactgcctggagagaaatactttcacagagcagccccacagaatgcatattatagggagtttttaaagacaaagagcatagaaaaactacatcctggttggcagttgcaggaggaagcaagcaagcagtaaaacagaagccaagaatatgcagttagctgaggccgtttgaccatgagcttctagaacaatgttgggtgttttcccacagtacttttcaaggcagaggttagaaaccaaagatgccttcagctaagacaagatggaaaattttttagcctgttacatcataaaagagtttatttcccccatcctacctcacctctcacacaccaaacaataaacaaaataataacaataaacaaaacaaaacacatgagaacatgctgtggatccaaagcaaaccattctgtgtccaaaaacataaccttttactagtgtgtttgccaaattgtcagtgtccatttgctctttttcaaagagcacacagagggtggggagatggctcagcaggtagagtaaccacttagtatgtgatatgtaagaccctgtccttgaactccaacacatcaagaccaaccaatcataaaagacaatggaaatctgttttagtcatcttttctgttgctgtggtaaaannnnnnnnnnnnnnnnnnnnttgcaggaggaagcaagcaagcagtaaaacagaagccaagaatatgcagttagctgaggccgtttgaccatgagcttctagaacaatgttgggtgttttcccacagtacttttcaaggcagaggttagaaaccaaagatgccttcagctaagacaagatggaaaattttttagcctgttacatcataaaagagtttatttcccccatcctacctcacctctcacacaccaaacaataaacaaaataataacaataaacaaaacaaaacacatgagaacatgctgtggatccaaagcaaaccattctgtgtccaaaaacataaccttttactagtgtgtttgccaaattgtcagtgtccatttgctctttttcaaagagcacacagagggtggggagatggctcagcaggtagagtaaccacttagtatgtgatatgtaagaccctgtccttgaactccaacacatcaagaccaaccaatcataaaagacaatggaaatctgttttagtcatctttctgttgctgtggtaaaacatctgagataagaatccaaggaggagggctggtgagatggctcagtgggtaagagcacccgactgctcttccaaaggtccgaagttcaaatcccagcaaccacatggtggctcacaaccacccgtaatgagacctgacgccctcttctggtgcgtctgaagacagctacagtgtacttacatataataaataaataaataaataaataaataaataaataaataaataaataaatctttaaaaaaaaaaaaaaaaaaaaagaatccaaggaggaggaaaaacatttagcccatgatttcatccttggctgcttgactcctttgctttgggtcctccatagaggctggacaagatggttgcttcctttaaggtggctagaacttaaagagaaagaaagggaggtgccagtgtcctgagatcgcttcaaggcatgctccaagtactctatcttccttctcttaagcactttgctcacatccaaaggttttacctcccaaagtgtcacaggctggcaactaagccatcatcaacacatggtttgggggggaggggcacaaaacaacagtaagatataagtctcttaatgactctatacattccctgaagacataggaagttttgctgagtgattggtcactagaagtaacagaggaaagcagccagaagattccctccatgagtctgatgatgactctatgcctagtctcaactgtcaccaggggtcttaatccatctctgcatttcccaacctagccacacgcaggctttcccttgcagacatctttctgctcttctgggaacctgaaannnnnnnnnnnnnnnnnnnntactttcacagagcagccccacagaatgcatattatagggagtttttaaagacaaagagcatagaaaaactacatcctggttggcagttgcaggaggaagcaagcaagcagtaaaacagaagccaagaatatgcagttagctgaggccgtttgaccatgagcttcaagaacaatgttgggtgttttcccacaggacttttcaaggcagaggttagaaaccaaagatgccttcagctaagacaagatggaaaattttttagcctgttacatcataaaagagtttatttcccccatcctacctcacctctcacacaccaaacaataaacaaaataataacaataaacagaacaaaacacatgagaacatgctgtggattcaaagcaaaccattctgtgtccaaaaacgtaaccttttactagtgtgtttgccaaattgtcagtgtccatttgctctttttcaaagagcacacagagggtggggagatggctcagcaggtagagtaaccacttagcatgtgatatgtaagaccctgtccttgaactccaacacatcaagaccaaccaatcataaaagacaatggaaatctgttttagtcatctttctgttgctgtggtagaacatctgagataagaatccaaggaggaggaaaaacatttagcccatgatttcatccttggctgcttgactcctccatagaggctggacaagatggttgcttcctttaaggtggctagaacttaaagagaaagaaagggaggtgccagtgtcctgagatcgcttcaaggcatgctccaagtactctatcttccttctattaagcactttgctcacatccaaaggttttacctcccaaagtgtcacaggctggcaattaagccatcatcaacacatggtttgggggggaggggcacaaaacaacagtaagatataagtctcttaatgactctatacattccctgaagacataggaagttttgctgagtgattggtcactagaagtaacagaggaaagcagccagaagattccctccatgagtctgatgatgactctatgcctagtctcaactgtcaccaggggtcttaatccatctctgcatttcccaacctagccacacgcaggctttcccttgcagacatctttctgctcttctgggaacctgaaatgaccctcttctgatttgtccattctacaaaggccaatcccatttttcctgagaacctttccatgggttcttccaaattctcctaaacactcagctggcagctgtgtttccaaggcagaccctcccaaacccactcacactctgtgcatagctcctcttatatccagagtcgtgctttgggttcactcatgtctgtctctcttcaccagaaatctaaaagcttatgacaatcaagaactgtaccttatttgggttcaaatctcacttgtgggcatgttagatctttgttgctgtaacaaaatatacaggaggaactatttaaaaggaatggtttcttttggcttgtgggtttagtgctttcggtttatagttacctgtcctccatctctgtggggttgtgtcgaggcagagtatcatggcagggagcatgaggtgaggcatagctgcttttcttgtggagtcctggaagcagacaataaaaagggaccaagcagatgatatgcacatcaaggatgtgccccagagagcctctttcttcatctaggtctaaccccctggttttcaccaccttccaatgtgatcagattatgaatctgccatcctatttatctgttggccagaactcttatggtataatcaccatcctgaagtcccccggccaaacaagctcccaacacatgagtctggaatggacacttcaaaccattagagaagtaacttagagtagcttagcttgagcctaagaacacattttgtgtttctagggtgagttgctcaggtcctaattcatatgatcattgataaaaatagatcaagtaatatgcataaattaatttgcaattataggcacccagtataccctagctctgatatcataactgcctatcacagcctgtagcattgtgggttttggtttgctgtttcttggtatgttaatacatttgtaggtcactgttttgttttgttttttcctctaggttcgatttaaaaatttggcatccagaccgtattctcttcatgctcacggactttcctatgaaaaatcctcagaggggaagacttatgaagatgaatctcctgaatggtttcaggaagatgatgctgtccagcccaatagcagttacacctatgtatggcatgccaccaagcgctcagggccagagaaccctggttctgcctgccgggcttgggcctactattctgcagtgaatgtggtaggtttcaagttctaatgtctccctcattaaagaaccatagttaaccatttcttgttaaaagtctctcctgggagctgggcagtggggacacaggcctttagtctcagcacttgagaggcaggggcaggtggatctgagtttgaggtcagccaggtctacagagtgagttccaggacagccggggcttcacaaagaaagcctgtcttaaaatctaacataccctgagacccccaccaccaccaccacacaccaaaaaagtctctcctgttttttatggggcacaagaaagggctgccatccccagtatagctgccaacaccagggattctccatgcagttcatcagaaagggcgcagagaaaagtgttcatccaacggacatgatgaggattacataaatgatgagtgctcacagagaaatgtgatcattaacaattttaaagtagtttagtcttaagacaggctttgggggactgcagagggtcgggagagggccaggcaaggactgagccaactgtgtgggcacatatcacatgctgggtttgggagtttaaggagcaaagtttttccctgctcccattaagcagaaggagattcaatttgttacttcatgagtagcctttgctaataaaggattttttttttgtattttgataataagtcaaccctgttctgagttaaataaggacacagggaggaggccacggtgtccccagaggaataatccaggcacattccaccccccaagcagcccccacaggaaggtgggagtaacttgtttctctagacaaactgtgttgatcatggccagctgtgccaatccccctgccctcttggctggccttcagcgcctaggaaagccagagagaagccagcatccatgcagtgcctgatatacgctcagctgccttctttccccttgaccatgagacacagaggcctttgcacagtgagacaccaaacaagaggtggctgaggactctccccaggttcacggccaacaaaacacagagccctctacctgggaaagggcagccaaggttcagattggccctcaaacacggatttctttgtaagacaaggtatctgggcttccactttgcccctggatgagtggttatggctgatttttaccagggtcaggataccagaggtcaggataccagaggtctatactttttggaagcaggtgaaggggtcaaagccatcacaggcctagtgacgacccccacctcatgtgaaaggctgctcaactaacaaggaaacagagcccatgtcaagggcagaggagttcccaagagccttctgaactcagtgccacaagaaataccatgcttgtctctgactatgtggggccccactgaacatggggctcctggggaaaggcaccaggcatggaatccagggccagacacagcacagcacagcacaggctgagttagcctcaggcaagggtgaggggaacaagtcctggccacccacccactgtgcctctctgtcatagaggatgcaatttcccacttactgtaacacacacacacatacacacacagagggacagagacagagacagagacagagacagagacagagacaaagacagagagagccccactccgggtgtagacaaatgccttgacattctttttgaacagtcctgataagcttttataacctggtcactgacaatttaaggatcttcacttatctttccacagcatacacaaggttcaaaaccacatgcttcatgtagtaaatgcacatgtgtttcagtgaagagaaagagagattcatttttcccgtagtaaaaagcgcgctgactcggtttcctatttatttgttgatgttgttgttgtttcgtgtgttttttcaatgctgagcatcaaacccaaggtctcctatatgctcaaatatttgccactgagcaacacccaccccgacgtgtctgtgtgggtgctcttctaggcgtagatgtaaatactcattctatcactacaggggcactaggagaacaatttacccttataaccacaggttctaaagttaaaataagatagagggtgtgcatggtggccacaatctgtgattccggctacttgggaggctatgaaactggctcagagtgtactcaagggcgatgtgagcaatttagtgagatcctatcctgaaaaatttacaagaggctgggaatgaaaatcagttcagttcccagttccaaaatagagagaaagagaaagagaaagaaggagggagagggaagggggagaaattagtaaatacatgtttaatgaatgcatttacatttgtcatttaggatagttgtcaggattaaataaataagctactacaaacaaagcctttaacacagtatcattactcaataaatggtatccatttggttgacaatgttattgttgctcagataaaggataactacccagttttagtctttactgatcttcaagatgggagcctctaaaatgagatttttctgttaagcgagagctgtgattgtcagaagagaaaagacgatccaggtgaaaggcaagtgtttgcaatttgctcttcttttcctccaggagagggacatccactcaggcttgatcggcccccttctgatctgccggaaaggaacacttcacatggagcgcaacctgcctatggacatgagagagtttgtcttactcttcatggtctttgatgagaagaagagctggtactatgaaaagtccaaggggtcacggagaattgaatccccagaagagaaaaatgcccacaagttttacggtattttttcctttgtctttccatctactctctggtaaaagcgcaccaggtcacagcggttcctgcacttaggtcttcacaagattagaccttaggtgttcctgaggagtcaggagcatcaattaagcctggttcctaaagtcagcatcctaaagtcaggatttggctggtaggaaaccctgctaaagatgattgagagagtgcaggatagcacgcatgggctactgccagacaaaccaacaagaaagtgggccctgtgccccagatagcagcattcattggagtgagcatggcatcactctttatgacactaatgaccttgtttctttttctctaaaaatgtgagtaatcactctaagacatgatcacatgtgtgtctcttctgaaatcagagtggctcttggaggcccatctcttcgcagttgcaggcagcacctatgccaggtggcctgagaatttaaggaactaggaagttgagtagccatataacgggacactggcaagacagccagtccttaggaggtcacactaggaaaagtatcgcttcagaagtcctttgatctgccccattctgatctgcctgtggcctgtaaattggcaggttaattacaaaacagttttagaaaaaggctgaatgaagggcttagtgtacagtcaaaacagcaacagctagaaatcagaagaaaataaagacaggtatatgctaggacggctcagcaaagaagaacacttgcttccaaactcaaggaccacccccccaaacccaaggaccacgcccccaaacccaaggaccacgccccccaaacccaaggaccactatcccaaacttgcatgatgggaggaaaggacagattcccaaaaggtggcctcttatctacacatacaaatcacagccatttgggcacatgcacacacatacacacacacatgcatgcacccatgcacacgcacacataaatttaaaagcaagtgaaaaaggcctattttcacagtttgaaaatggagatagttggcctgaaacttctgattactgaggtcttgtgctttaggtaatgagtctgttagaatattgggggagaaaaagcttgcaagtgcctaaaatcccaacactctggaggctgaggtgggagggttgaaagttggagactagcctgagcaactcggtgagatctgtctcaaagaataaataaatacataaacaaacaaatacaggtcaagatatttttataacaagcattagatgccacctctggccaaccattgatgctaggtagccctgtatcggtgacacacttaagacacacttcttctgtatttgacgctacttccgggagaatttcaataatgtcacctgtaaaaatactttgagatacaagcaggcaaacaatgatttgttgtaaaaatcccacccatgaaggatgaagtctacttttcaggaaaacatttaaagattttaannnnnnnnnnnnnnnnnnnnnnnnnnnnnnnnnnnnnnnnnnnnnnnnnnnnnnnnnnnnnnnnnnnnnnnnnnnnnnnnnnnnnnnnnnnnnnnnnnnnnnnnnnnnnnnnnnnnnnnnnnnnnnnnnnnnnnnnnnnnnnnnnnnnnnnnnnnnnnnnnnnnnnnnnnnnnnnnnnnnnnnnnnnnnnnnnnnnnnnnnnnnnnnnnnnnnnnnnnnnnnnnnnnnnnnnnnnnnnnnnnnnnnnnnnnnnnnnnnnnnnnnnnnnnnnnnnnnnnnnnnnnnnnnnnnnnnnnnnnnnnnnnnnnnnnnnnnnnnnnnnnnnnnnnnnnnnnnnnnnnnnnnnnnnnnnnnnnnnnnnnnnnnnnnnnnnnnnnnnnnnnnnnnnnnnnnnnnnnnnnnnnnnnnnnnnnnnnnnnnnnnnnnnnnnnnnnnnnnnnnnnnnnnnnnnnnnnnnnnnnnnnnnnnnnnnnnnnnnnnnnnnnnnnnnnnnnnnnnnnnnnnnnnnnnnnnnnnnnnnnnnnnnnnnnnnnnnnnnnnnnnnnnnnnnnnnnnnnnnnnnnnnnnnnnnnnnnnnnnnnnnnnnnnnnnnnnnnnnnnnnnnnnnnnnnnnnnnnnnnnnnnnnnnnnnnnnnnnnnnnnnnnnnnnnnnnnnnnnnnnnnnnnnnnnnnnnnnnnnnnnnnnnnnnnnnnnnnnnnnnnnnnnnnnnnnnnnnnnnnnnnnnnnnnnnnnnnnnnnnnnnnnnnnnnnnnnnnnnnnnnnnnnnnnnnnnnnnnnnnnnnnnnnnnnnnnnnnnnnnnnnnnnnnnnnnnnnnnnnnnnnnnnnnnnnnnnnnnnnnnnnnnnnnnnnnnnnnnnnnnnnnnnnnnnnnnnnnnnnnnnnnnnnnnnnnnnnnnnnnnnnnnnnnnnnnnnnnnnnnnnnnnnnnnnnnnnnnnnnnnnnnnnnnnnnnnnnnnnnnnnnnnnnnnnnnnnnnnnnnnnnnnnnnnnnnnnnnnnnnnnnnnnnnnnnnnnnnnnnnnnnnnnnnnnnnnnnnnnnnnnnnnnnnnnnnnnnnnnnnnnnnnnnnnnnnnnnnnnnnnnnnnnnnnnnnnnnnnnnnnnnnnnnnnnnnnnnnnnnnnnnnnnnnnnnnnnnnnnnnnnnnnnnnnnnnnnnnnnnnnnnnnnnnnnnnnnnnnnnnnnnnnnnnnnnnnnnnnnnnnnnnnnnnnnnnnnnnnnnnnnnnnnnnnnnnnnnnnnnnnnnnnnnnnnnnnnnnnnnnnnnnnnnnnnnnnnnnnnnnnnnnnnnnnnnnnnnnnnnnnnnnnnnnnnnnnnnnnnnnnnnnnnnnnnnnnnnnnnnnnnnnnnnnnnnnnnnnnnnnnnnnnnnnnnnnnnnnnnnnnnnnnnnnnnnnnnnnnnnnnnnnnnnnnnnnnnnnnnnnnnnnnnnnnnnnnnnnnnnnnnnnnnnnnnnnnnnnnnnnnnnnnnnnnnnnnnnnnnnnnnnnnnnnnnnnnnnnnnnnnnnnnnnnnnnnnnnnnnnnnnnnnnnnnnnnnnnnnnnnnnnnnnnnnnnnnnnnnnnnnnnnnnnnnnnnnnnnnnnnnnnnnnnnnnnnnnnnnnnnnnnnnnnnnnnnnnnnnnnnnnnnnnnnnnnnnnnnnnnnnnnnnnnnnnnnnnnnnnnnnnnnnnnnnnnnnnnnnnnnnnnnnnnnnnnnnnnnnnnnnnnnnnnnnnnnnnnnnnnnnnnnnnnnnnnnnnnnnnnnnnnnnnnnnnnnnnnnnnnnnnnnnacaccacacacagacatataccacacacacaccgcatgcacacagacatacactacacataaacatactacatactcacagcacacatacacacacacaaaggcaaacagtggtagtatggtcaaggagaaatcaagaaggccttgagctcaagttcaccttgggctaaaaagtgagttccaggcaaaacaaaacaaaacaaaacaaaacaaaacacaatccacctatttcactaaaggaatgtagatacaacaatgcactacctgagacttagactctaacctgagaggtaggtagaggagccgtctctacaaggagagtgtgacacactgaacctgtcatttactctcaccctagggctttgtattatccaccctttctcattcttctgcagcaaaagaacatttatactatcatgtgaagggcaaatgggcaaagccttaagcaggagagggacaaaatctaggggaaaagacaaaggctgttttgaaatggagctgaatcatacttttgcaggtgttggaagttctaattcagcctcttattggttctatggaactgccaagaactctttctataactgcgtaggcctagaaatgcctggcaatgaggaagatgggtggtgatgggggaagcctacctgactcctccttgtgagacaagttcttaaatgattacaactttctttcctttcagcaattaatgggatgatctacaacctgcccggcctgagaatgtacgagcaagagtgggtgaggctacacctgctgaacatgggcggctcccgagatattcacgtggttcacttccatggccagaccctgctggataataggaccaaacagcaccagttaggcgtctggccccttctgcctggtaaagatctgagtgatggaagaggtccctgctaaggaatagatggggcacctgtaagcgagatagggcgccatctctctttctctccttgtacatctaccatttaaggaatcagaagagaagatctagatcctgaggcaaagctctgtttccatgctgtatacagaacacaaaacagatctcctatgagctgtgtgtaggcacctcgcaggacagatttgtgagcccacttggttctacagagattctgtgtcccatgcagtttctcctgtgtctttagaattagatttaagtacatgacaagataagtcaccaaggcacaggaaaaaagaaacagttgctattgggaggttgattagaaacttaaattgagctcttctggattcttgtaatccacttctgaaaccttcaccctgactttctgaggaagtgactctgagaatcataagcttgaacagatccatgactctggagggaaggtaccttttaatgactctaagagctgatggggtacttagagctttgcatgtgaaagtaggagggttagtttagtgtagatctaaacaaacagcagtcatcagtgagggttttgttgttgtgtccctaagttgtttccagggagacctgttagtgaaaggggttatgagggcaagatgccactgaagacctaagacactagctaggatgcacatctactgcgactttactctcagaggctttggataggcataggtcttggagaggagagccaggattctgcatctcttccaaggtctgaggatctagtgaaaggccatctctttgcaggagttagggtgaggaagtcaatgtgtgaattggtctcatatatggacatggagatagtcattgtgtgaattggcctcatatttgaatttggaggaagtcactgtgtgaattgatctcatatgtggacataaaggaagtcactgtgtaaattggtctcatatgttgacaaggaggaagtcattgtgtgagttgatcttgtatgtgaaaatggaagtccagatgggtccattttactaagaagacagaaaaatggcttcttgtttggttcttccatgccactttctaagaaatatagaaagtgatgttctgtttaacttcagacacaggatggaccaccaaattcagcccatattttcacaagagaagaagatgagaaatcttgctcactgtgtttgagatgaatagtcatccactgttaagttttaccttcagtcagggacctggtcctaaattatatcaatggaatttaagcataggatcaattggcagagtagacatcaagtgtcagtatgaataagcagaggttttagaaacattttcattttttctgaaataatttatatacatttttacccatgtatgtacacttttaagagtatttgaaaccataaggaaaggatatttttattccttacatattaacatagaagaagagagaaagaaaacatatttaatagccataaagttgagtaattttgaaacttggaactgtacttgaattgtgtatggggtaacttgtaacagtacagataaataaaaattcctttttaggggagctgatagattttttttaatgtctaagttatttatttgtagcatttttttcttatttgtctgcttgatggtttatttgctcaaaatagtctcctgtatccccatacagtaacagatggctttgaactcctgatccttctgcctcctcctatgagcactttgattagcagcatatactaaggtgcccagtttatagggttcttggtcaaagtcgggactttgtgaattctaggcaagcattctcctgactgtacctccccaccctagttttggtgatttgtgggtgctggtgctgtagctgctgttgggttcattttcatctgtaacaacctcaagagaaatgcaccactttaattaaagtctcctacacatgggatacagggacttcaagattcatagagagctccgtcacaacattaatgtgttaaccatcgagtttgtaattttgtcctcactctctattttaggttcatttaaaactcttgaaatgaaggcatccaagcctggctggtggctcctagacacagaggttggagaaaaccaggtagctggcatgcaaacgccatttctcatcatagacaaaggtatcacttgcatgttgtttacgggtgagggagtgcctagtactagactatttccaacttccagattgaaagtaatctgcaagtgtgaaaatgtgaagacgggctttttttttctgaccattaaaaacataacaattatctctacaaccctaacaaataggtcaaatattccatgactggggaaccaatagaaagtgcccttcctcctaatttgtgatccatgggaaaatatacataagaaaatctctaagttcctagagtagagcagaaagagtaatcagaattctgcagtaacaggcagtaatctctccactcatgagcagttcttgccaagcatctgtcgactaccaactacagtgctcacatccaggtacccattatctggtatttctttccttgagcaagatgtaaatagcattgtactctccaggtcaatggccaagagtgcattcttatgagtaatagtccttaatgtaaatagtttgctttaaaatacaaccagatggacatcagcttaaacatactgttttaaagactccagttattttctgctgtgttagttactattcagataagcaccagtcttgctgagtgtttatctctttctaactgggcatattagagtcattatcatggatggtaaatgaaaataatctctagacatagaggttttacttgtcatatgtagtttctgagcaaaaagcatttgtttttgttttttcctagagtgtaagatgccaatgggactaagcactggtgtcatatctgattcacagatcaaggcttcggaatatctgagtaagtatggacatcatagcctgtgaccggccatgcctacagtctcagtatgcaactcataaagctatgcatgacagtcacctatgagccaattcctctctctaggctttcgtctgctatagcttaatgaaacaaccccatttatggggttcctctggaagaggaagaagaaatatttcaggagcaaaaatcctattcatacatttatcatttccacttcttgtgatgtgtattgttcccaaagggcctgttctaggaaaaatcaagaattcaactttgctgatatatccgcctaggcagcccagtagctctacagggaattggcagggaataaataactttatcttatgaccttgtaattatttcccaaattccgtttatcttacctacattgactcacacgcaaaacctccaacaagattcacagggttctatcacctaaggaagagggtctcaatgtttatgctagccattcatctagtcaagaaacattacgatcaaagtatctcttaaaatttttttccttctgcctcaaatcccttcctgagatctagaggctgtcatcaaaagaataatgaggttcccacatattcctcccaagtcttcctgtttggtaggcacactcggcagtagccgtatcaacataactgagaaaacacaaacatgacctatgtgctagaaagggtggatgatggcttacaactgactaaacatggcctgaagccaaggtttcatcactgaggactagcttggcagccaaagttcatgtcacctgcctggtctcataactatagcatataggtctggttctctgctgtactaaacttatttgagaagttggtagttttctattgagggtggggagaattcttcaagccagacatggtagtatatggttgaggcagaaaaacagtgaactttagtcctgcctggtctatatatacaacaagacttttttttttttcaaaaataaattaattcacaaattcctttttttcttcttttgaatttagcttattgggagcccagattagcacgattaaacaatgctggttcatacaatgcttggagtatagaaaaaactgcattagattttcccattaaaccttggatccaggtacgtctaactaacctcataatattggttacgatgatgacaacacaggtcgtgggtttagttgtttcttgaaatggcaatgaaggaaacagccctgagtagatgtagttactgttctcagtggttgctttctcataattgacaatgagaggtaggtcaagtaattttcagtctatgaaagaaaccccaacaacaaaggtgtcaactgctttcccaaagtgcagcacagctagtcagtgcccacactgacattcaagttcagatgtgctttgctcaactgtgggctgtacctcaccacttaatgaatttactaagaccttgggtattcccaatgctaaagaaagctgattatagcttgagttacggtaaggtgtgactcactaacaaggatggttctgtttactcgcttgactgtgttgcaggtggacatgcagaaggaagttgtagtcaccgggatacaaacccaaggtgctaaacactacctaaagtcctgctttaccacggagttccaagtggcttacagctctgaccaaaccaactggcagatcttcagagggaagagcgggaagagcgtgatggtttgagcactcatttctagctaaatcttaaggctcacgctgggctttccatagcagtagcctttcaaattgcatttcggggagttagaaaagtgaatgaatggctttctaagggtcttaggaagtgaaaatgatagtatgatgatgggtctgtacaataaaaaaatcttcaaatctctgcagaacttgaaaggaaaaacattgaagcaagtaccacttcaaaacagattggcagcagtattcagcgcagtgtccacccttgttcaacacagcccctatgctaggaactgcttgtgtctgcaaagggttttgatttttctatcaccttttactttgttctgtatctcacacaccttgatttatggtgattgtggacatccattgatgctctgaggcaccgtccttctctggccaccttagaggacatgccagaggacttacagactcccgtctggtattccatgagcccagacaagatgcctagatcattcctcattcccaggctcctcccccaagaataatatccaaacactgagagcctgtctgccatgattgcacaaacaccttgagtctgtttctgttggtactttatgtaaatcaatcactttaccacgtgctactttttctttgctgtcttgactgtttctagtagtgacatatttgtaatgtagcttagataaaaatcactaaaaaagaaaatcctaaattccggtgcttatcatatcaaccagtaaggggagagaaaacttgatagccatcaaaatcatgccttcaagattttcagatccatatctatgcaggacttcggcatgtagtttgatggttctgtaatttgattgtctcaagctttaataccacagtaatagaagacatgtagatgcctagatcaatacttcctgtgaatcgggaagtattcttttctgtgttctggatgtgatttctgaagtccatgagaatagcttcattcagcagaaatcacccataaaactatcaggacctgaaaggcactttgtgggaaaatttaaattcagtgtttttcattagctgtttggaggttatctgaatatctgaatagtctatttcatattgggtgatttatgatactttgtgtggcatttaaaatatgagttgccttttttctttaagttgctggtcatgtgtgtagggtctaatactagttgtcctccaatcctcctgacatcagagagtcagagtctgtagcaatgttgcttatgtaatctctggtatcatcatttttctcttttacttttagatcaggcctgctgcagacttgtccatttgttttcccatcatttccaagtgccaattcctttattaaattttcttctgtggcttcaattgtgctctgtcttgcagatctactctttgcttctgttttaaatggacgttttacgatacttctctgtgagagaaagggggtggggcacagcctgatgaccgccaggtagaggtcagagtccaggctctccctggacaccttaggaggcattgcttcccttggctgctgagtagatatagagttccacactggtttctcctgacacagctgagggcttcttattgggaagagtctggagctcctaggatggttcttgtaccacttttgtcccaggagcctcaaagtctaaccctttcattatcgccattgcctctatgcttggcttgtatctgggtgtttgttttcctgtgatagttggatggtttacaacagttatctaaggagagttgtggggttttttttcacctataagactggaacatacaaagtaagcaaaaagcccccccttggggggcggggggggcaacaccatgttattctttgattcctgagaggcttgggtagtctgttttcttcatgccctctttccatctttcttttcttcttttatgcatagtcccaagtttctacataacaggaggaaggacaggaaaaagagcatcagcaatagcttcctcgaagtagacatatccacaattagtttttcaaaccaaattaaattgatcccatttctataaaggaaccttacaaaacttgttagatgggactttaaaaaaaatatggtcagtgtttagagaattgttattaatggttttctctctccctctagtattttactggtaattcagatggctctacaataaaagagaatcgacttgacccacccattgtggctagatacattaggatacacccaacaaaatcctataatagacccacccttcggctggagctgcagggctgtgaggtgaacggtaaggggcaagaagtaccaccttcccacggacactctagactcaagattcgggtggtgtgggagaggagcattcttagataacttcagtgccttaggctccagaagaacctttgcaagacaaattccagtagggaatactctcagtgtgatctaaatggaggcagagcctggttctagtagtccagggggtagggtgggggcagcacctcactcctcactgcatggtgtgagcgtcatggacactgtctggtcagcccattttcagtgagagccacctgactctccgtcactgtcatttttttttttttttttttttttttggtgatcagtgatcgatcagtgatcgttttttttttttttaatctgaacctggctttcaacttctgaaaaccatgtgtgtgctctgtgctctgttttggactcgtgtgagaacctgagtcttcctaagcatctacttttttttcaggggatgaaatttgtcttgtgatctaataaatctaggtcataataacagtcataatagtccactgactagtctctgatttttttaaaacaaggctttccaggattgttttaataatttgcttattttttattttatgcacattgatgttttggctgcatatgtgtctgtgtgaaggtgttggatcctggagttacagacggtagtaagctgccttgcgtgtgctgggaatcgaacgcaggtcttctgaaagaacactcagtgctcttaactgctgagctatctctccagatgatctttccagcatttttaactttcaggaacatgcaggaaatactgtcatcgtccaggcattctggggtaaaagacaaaaatacccaggcctcaggtgactgctaaagacaggactaggtgagggatgaagagtcacacacggtgtgtcatgccctgggaagctctctcatcttcccctgaggtaggggagaaaggcccaactcacgtgaagcgagtatctgaactttggaatcaacttcttaccaaagcagatagtgctgcatgtgacatttgtaagagctatgcacagggagggacgcttgcccgtatctggatatcagcagtgtagaaaaccacccatacagaatgcaaatgttgtataggcgggattatcctgtgaagcagatctgtaagtcattggggcggggggggggggtaattcccataatcacagtgtccgtggtagctttggtcaatcatgtagtctaacaaatctaaaatgtgaggtgaggttctgttaatttactaaaaatattccttttctacagaaggagcatggcatttttctcttcgctttttggaacttacatagcaagcagtgaatgtttctttcaggatttttttttctttttttgacatagagaaagcaagctattgcttcaagaaaatgtctgtggttttgtgttgttcccccaaggaaaaacatagtaccactaagacagtcagctgccttcactcactagctaggtttcctatgccaatagttcgtctttgcttccctagaacgctcaaaagtatgcccaggcaaagttctaaagagtgtatgtgttcaaaatgttgaaagtgaaaatagaaaaggtgcctaccaaagccccactacatctccatggcttctgttggcagaaactttcctttcagtacagccatgcattgctgcaccacaggaatcctttcttagaactgcatctttaggccattttgtgttttactgtgcaaacatcatagattgtgtttacccagtaccggccagtcacccaatgtggtcttgatacaatcaagagacagagcaagtgagcataacactacactgtttcacagtgttcaaaaataacgataagaagtatagccaatacacaaagcagttacgttggggtttattattgaatattatgaattgtacataactgtgtgcactgtactacacatgtcttagcacagtaggttgatttatacagacaccatcacaaacacagaggctatatattacttatgacaactatgatgtcacaacagctccatagcctaatgggaccactaggatttgtgtactctgttattaacagaaatgacattatatgctgcatggtggtacgtattgttcagaaccagcatctatctcaaagcaaagacttgagactctacggctgtctgaagaagggagaacccacacttaaatactgtgttgagtgggacactggctgtcagttcagtttcctcttcttctgacagttttgtcatgttcttgtatcttgctgtattctgtgtccacttctgtcatgggtgtatgagcattgaataatatattagtagcatcagagtggtatttgcacttgaattgaataaattgttctttgttttgctgtttcctggaagtgataattttttttgggtcttctgtgttgcaaaatgcagcgcagggatcattagtgctgtgtaattaatcatattactttcctcttgacaggatgttccacaccactgggcctggaagatggacggattcaagacaagcaaattactgcatcttcatttaaaaagtcgtggtggggagactactgggagccctcccttgcccgcctgaacgcccagggccgcgtgaacgcctggcaagccaaggtgacagcaaccatataaatggagttctctcactttccagaaacaaacaatgaccaccaccacaggggacaggagggtggctgggaactggagtgtgagcctctgaagtcccaggtctgagaatctaggaagacttgcagaatcaacagctttcggctctaaccatgactcagagaaaagtcgtacctcttccttgtagttcttgcgagctttgatttaaagcagaaagggacaacagcttgcaaagaactagatagtacatattttaggccagtggttctcaagcttcctaatgttgtgactctttgatacagtgacttgtgttgtagtgaccccaagaataaaattatttttgtttctacttcgtaactatatttttgctactgttatgaaccataatgtaaatgtctgatatgcaggatatctggcatgcaaaccccatgaaaaaccatttgacccccaaaggggtctcgacccataggttgagaaccactgttttaggccaagttttctgtgcattctaagtcctcatgtaagtgaatggggacagtcgtggcttaccagttcctaggtgaggcactttaacattaataacagacaactaattatggtttataacatatctcttttttcataatttgccactttaaaatttttccttccctttctttgtgacattcctcaagtcagttggaggtggcacagttgtaaaaccaggagtctaaatcagtgatttgagttaaacaaacaccttccggaaagttcctttgatcttgctccactaagtattgcaggccattcggtttgaagataactgttaatagctgacttattcttatttcattcttcgcctgatagtgggatcacaatactgcaataactttatgatcccttcagacaagacaatccaagttcattacctagtctcttcccatctccctcccttaagatatgtgttaatatatatgtaaatatatgatagataaatatttatacgtgtaaatacatcctaattcctaaattctgaagaaatcttggttctaatctcagagtaggccagtagaaacaaaagtgtggcaagtgagacccacgcggtggcttaggagccaacccctgtgctctgaaacccgttctcgcctattgtgaactcagcaggctgggctggcagcagtttgtaatgaagcatctctccaaatctctctgtgcacagattaaatctcagcttagtgtcagggcagaatcttggctagaattccattctcggctaaaactccagatgtttccctgtatgaagcaacccaaacatttcattttgcaattctgcagaagaaaactgatactcggagaaactaaaacaattaaaatagtaacattacattacatactgacataaaaatataaaaaatgaaagtgtcatatagttattataccccagatatccctttaaacctgtacatggtaaatcttgtcaccctacactctgttctacatcctttaaaagaaatcctttctatagagttagctttaatcactgggattgtaattaagaccccttcaaataaatgctaactatagttttttaatgtcatatttaatctgaatttctcagtcataaatttctgtttgatctaaccttctcttagcacaaagtatctttatatgatatttaaggaggatgaaaatcaaagccagaaacatgcaggtgtgcatagcctatctgtccatggctgagtgcctcttacctgatatatatgaaacccttcacctttatcttgtaacattgatacaaccttgattttaagtcactctaagatgacacacagagggtctcacaaagttaacaaagttttagtcctttaattcaatcaattttcttaaaaaaaaactttatcatgtaaatatttagatatgtattcatatacacacatatgtccacatgaataggaacaatattgagaaactatcatttattccatccacaattgcatgatacgtctcccaaaggtagaaactcatcccagacaactccagacatgagtccctctgaactctcttcaggagcatgtcctcacggaacatgaggagactttttgtgaggctagattgtagatactcaatcctttctcagacgtccctgaaacaatttacagcatttaaatgaacttgcttaaaacacttgcaaataatttggaaatttattctttttgtttaaagtaaaattcatttgtcagttaagtatccagcagctacttattaaacatcaactatgtaccttgtattgctatgaatacagggggggggaggactaataaagcccccaccctggagcagcaaaagacataaacaagcaaataagcactgtatacagtatgaaatgcatcagtagaatttaaatcttttgaagttggtatacaaagcaataggtttgtgtgtgtgtgtgtgtgtgtgtgtgtgtgtgtgtgtgtgtgtgtgtgtgtgtgagcttctttgtggtgttttgtcattatacttcgctcttaaccatttatttccctttagcgttgtcttccccagtcaggcatactctattactttctctctaaccccccctcccggtcatgatccataacaataaacatgaaattacagggaagtcttctaaaagacagcgacttgtaaaggaggagatggaaaagctttatgcattttctaagcatcttgttcttctatttttggttgtgagcctggcctttaactgctgagccatctctccagccctaaacatcttgttcttaaggaaaagaaaggagtaatacttttctcatctcagtgcttttgttgttgttgttgcttccgtaggcaaacaacaacaagcagtggttacaagtcgatctgctcaaaatcaagaaggtaacggccatcgtaacgcagggctgtaagtctctgtcctctgagatgtacgtgaagagctacagcatccagtacagtgaccagggtgtggcatggaaaccttaccgacagaaatcctccatggtggacaag

SEQ ID NO: 78 - DNA, 6413 bp, Mus musculus
gggccatgctcctagtctgcccgtgcttcttcctcctggtggttctgggaacccgctgggcgggctggggcagccaccaggcagaggccgcgcaactaaggcagttctatgtggcagctcaggggatcctctggaactatcatcctgagcccacagatccaagtttgaattctataccttccttcaagaaaattgtctacagagagtatgaacagtattttaagaaagaaaagccacgatctagcaactcaggacttcttggacctactttatacgctgaagttggggacgtcattaaagttcactttagaaacaaagcagacaaaccactaagcatccatcctcaagggattaaatacagtaaattttcagaaggggcttcttacgcagaccacacgttccctgccgagaggaaggatgatgccgtggctcctggagaagaatacacctatgaatggatcgtcagtgaggacagcgggcccacacctgatgacccaccatgcctcacccacatctactattcctatgaaaacctgacccaggatttcaactcgggtctgattgggcctctgcttatctgcaagaaaggcaccctgaccgaggatgggactcagaagatgtttgacaagcagcatgtgctcctatttgctgtgtttgatgaaagcaagagccggagccagtcaccatccctaatgtacacaattaatggctttgtgaataagacgatgccagatataacagtctgtgcccatgaccacgtcagctggcatctgatcgggatgagctcggggccagaattgttttctattcacttcaacggccaagtcctagagcagaaccagcataaagtgtccaccgtcaccctggtcagcgcaacatctacgactgcaaacatgactatgagcccagaaggaagatggattgtttcttctctcatcccaaagcattatcaagctgggatgcaggcttacattgacattaaaaactgcccaaagaaaacgaggagccccaagaccctcactcgggagcagaggcggtacatgaagagatgggagtatttcatagccgcagaggaggtcatttggaactatgcacccgtgatacctgcgaatatggacaaaatttacaggtctcagcacttggataatttctcaaaccaaattggaaaacattacaagaaagttatctacaggcaatatgaagaagagaccttcaccaaacgcactgacaaccccagcatcaaacaaagtgggattctgggccctgttatcagagcccaggtcagagacacactcaagatcgtgttcaaaaatatggcgagccgaccctacagcatttaccctcacggggtgaccttctctccttacgaagatggaatcaattcttcctccacctcaggcagtcacaccacgatcagaccagttcaaccgggggaaaccttcacttacaaatggaacattctagagtttgatgaacccacggaaaacgatgcccagtgcctaacaaggccatactacagtgatgtggacgttacaagggacattgcctctgggctgatagggctgcttctaatttgtaagagcaggtccctggaccagagaggtgtacagagggtggcagacatcgagcagcaggccgtgtttgctgtgtttgacgagaacaagagctggtacattgaggacaacatcaacaagttctgtgagaatcctgatgaggtgaagcgtgatgatcccaagttttacgaatcaaacatcatgagcactatcaacggctacgtgcccgagagcatttccactctgggattctgttttgatgacactgtccagtggcacttctgcagtgtgggaactcatgatgatattttgaccatccacttcactgggcactcgttcatctatgggaggaggcacgaggacaccttgaccctgttccccatgcgtggtgaatctgtgacagttacaatggataatgttggaacttggatgttgaccaccatgaattccaatccaaaacgcagaaacctaagactgagattcagagatgttaagtgtaatcgggattatgacaatgaggactcatatgagatttatgaacctcctgcacctacatccatgacaactcggagaattcatgattccttagaaaatgaatttggcatagacaacgaagatgatgattaccagtacttactggcgtcatcattaggaattaggtcattcaaaaactcatcattgaatccagaggaaaatgagttcaatctcactgctctcgctctggagaacagctctgagttcatatctccaagcacagacagagttgttgactcaaactcttcacgaatccttagtaaaatcatcaataataacctcaaagactttcaaagaacacttcctggctcaggagccaccgtggctggtaccctccttagaaacctcattggcttagatgagaacttcgtcctcaactcttctacagaacatcgttccagctcatatcatgaaaatgatatggaaaatccacagtcaaacatcacaatggtatacctacttcctcttggtccaaaaggatctgggaatcgagaacaagataaacctaaaaccatcaagacaggaagaccccacatgatgaagcacaggttctcctggatgaaagcgccagctggtaaaactgggaggcattcaaacccaaagaattcgtattctggaatgaagtctgaggaggacattcctagcgagttgatacccttaaagcaaaagatcacttccaaatttctgaatagacgatggcgtgtggcttctgaaaagggtagttatgaaataatagcagcaaatggtgaagacacagatgtggataagctgaccaacagtcctcaaaatcagaatatcacagtacctcggggagagagcacctctcacacaaacacaacaagaaagccaagtgacctcccaacattttctggagttggacataaatctccacatgtaagacaggaggaagaaaacagtggttttcagaaaagacagttattcatcaggacacggaagaagaagaaaaataagaagcttgcactacacagtcctctatctccaaggggctttgaccctttgagaggacataaccattccccatttccagacaggagactacttaatcactcactgttactccacaagtccaatgaaacagctctttctccagacctgaaccagacctctccttcaatgagtacggacaggtcacttcctgactataatcagtactcgaaaaatgacactgagcagatgagctcttctttagatctttatcagtcagtgcccgcagaggaacactctccaacatttcctgcccaagatcctgatcaaacacactctaccacagatcctagctacagatcctctccgccagagctcagccaggggcttgattatgacctaagtcatgacttttaccctgatgacattggtctaacatctttctttccagaccaaagtcaaaagtcatctttctcttcagatgatgaccaagcaatcccttcctcagacttaagcctctttaccatctctccagaattggatcagacaattatttacccagacctggatcagttgctcctttctccagaagacaatcagaagacctcctccccagacctgggccaggtgcccctttctccagatgacaaccagaagacctcctccccagacctgggtcaggtgtccctttctccagatgataaccagaagacctcctccccagacctgggtcaggtgcccctttctctagatgacaaccagaagacgacctccccagacctgggtcaggtgcccctttctccagatgacaaccagatgatcacctccccagacctgggtcaggtgcccctttcttctgataaccagaagacctcttccccagatctgggtcaggtgcctctttttcctgaagacaaccagaattacttcctagacctgagtcaggtacctctctcctcagaccaaaaccaggagacctcctccacagacctactgactctctctcctgattttggtcagacagtcctttccccagacttggatcagctgccactcccttcagacaatagtcaggtgaccgtttccccagacctcagcctcttgaccctctcaccagattttaatgagataatcctagccccagaccttggtcaagtgaccctctctccagacctcatccagacaaaccctgctcttaatcatggacacaaagcatcctctgcagaccctgatcaagcatcctaccctccagattctggtcaggcttcatcgcttccagaactgaatcggactcttcctcatccagatctcaactcacatacccaccttccttcaccatctcccacactcaataacacttctttgtcaaggaaatttaaccctcttgttgtagtaggtctcagtagagtagatggagacgacgttgagattgttccaagtgaggagccagagagaatagatgaagattatgccgaggatgactttgtaacctataatgacccctacagaacagacactaggacagatgtcaattcctccagaaatcctgacactatcgcagcatggtacctccgaggccacggtggacacaaaaaattctactatattgcagctgaagaaataacctggaattacgcagagtttgcacaaagtgaaatggaccatgaagacacaggccacactccaaaggacaccacatacaagaaagtcgttttcagaaaataccttgatagcacgtttacaagtcgtgatcctcgggcagaatatgaggagcaccttggcattctcggtcctgtgatccgggctgaagtggatgatgtgatccaagttcgatttaaaaatttggcatccagaccgtattctcttcatgctcacggactttcctatgaaaaatcctcagaggggaagacttatgaagatgaatctcctgaatggtttcaggaagatgatgctgtccagcccaatagcagttacacctatgtatggcatgccaccaagcgctcagggccagagaaccctggttctgcctgccgggcttgggcctactattctgcagtgaatgtggagagggacatccactcaggcttgatcggcccccttctgatctgccggaaaggaacacttcacatggagcgcaacctgcctatggacatgagagagtttgtcttactcttcatggtctttgatgagaagaagagctggtactatgaaaagtccaaggggtcacggagaattgaatccccagaagagaaaaatgcccacaagttttacgcaattaatgggatgatctacaacctgcccggcctgagaatgtacgagcaagagtgggtgaggctacacctgctgaacatgggcggctcccgagatattcacgtggttcacttccatggccagaccctgctggataataggaccaaacagcaccagttaggcgtctggccccttctgcctggttcatttaaaactcttgaaatgaaggcatccaagcctggctggtggctcctagacacagaggttggagaaaaccaggtagctggcatgcaaacgccatttctcatcatagacaaagagtgtaagatgccaatgggactaagcactggtgtcatatctgattcacagatcaaggcttcggaatatctgacttattgggagcccagattagcacgattaaacaatgctggttcatacaatgcttggagtatagaaaaaactgcattagattttcccattaaaccttggatccaggtggacatgcagaaggaagttgtagtcaccgggatacaaacccaaggtgctaaacactacctaaagtcctgctttaccacggagttccaagtggcttacagctctgaccaaaccaactggcagatcttcagagggaagagcgggaagagcgtgatgtattttactggtaattcagatggctctacaataaaagagaatcgacttgacccacccattgtggctagatacattaggatacacccaacaaaatcctataatagacccacccttcggctggagctgcagggctgtgaggtgaacggatgttccacaccactgggcctggaagatggacggattcaagacaagcaaattactgcatcttcatttaaaaagtcgtggtggggagactactgggagccctcccttgcccgcctgaacgcccagggccgcgtgaacgcctggcaagccaaggcaaacaacaacaagcagtggttacaagtcgatctgctcaaaatcaagaaggtaacggccatcgtaacgcagggctgtaagtctctgtcctctgagatgtacgtgaagagctacagcatccagtacagtgaccagggtgtggcatggaaaccttaccgacagaaatcctccatggtggacaag

SEQ ID NO: 79 - protein, 2130 aa, Mus musculus
MLLVCPCFFLLVVLGTRWAGWGSHQAEAAQLRQFYVAAQGILWNYHPEPTDPSLNSIPSFKKIVYREYEQYFKKEKPRSSNSGLLGPTLYAEVGDVIKVHFRNKADKPLSIHPQGIKYSKFSEGASYADHTFPAERKDDAVAPGEEYTYEWIVSEDSGPTPDDPPCLTHIYYSYENLTQDFNSGLIGPLLICKKGTLTEDGTQKMFDKQHVLLFAVFDESKSRSQSPSLMYTINGFVNKTMPDITVCAHDHVSWHLIGMSSGPELFSIHFNGQVLEQNQHKVSTVTLVSATSTTANMTMSPEGRWIVSSLIPKHYQAGMQAYIDIKNCPKKTRSPKTLTREQRRYMKRWEYFIAAEEVIWNYAPVIPANMDKIYRSQHLDNFSNQIGKHYKKVIYRQYEEETFTKRTDNPSIKQSGILGPVIRAQVRDTLKIVFKNMASRPYSIYPHGVTFSPYEDGINSSSTSGSHTTIRPVQPGETFTYKWNIFDEPTENDAQCLWYYSDVDVTRDIASGLIGLLLICKSRSLDQRGVQRVADIEQQAVFAVFDENKSWYIEDNINKFCENPDEVKRDDPKFYESNIMSTINGYVPESISTLGFCFDDTVQWHFCSVGTHDDILTIHFTGHSFIYGRRHEDTLTLFPMRGESVTVTMDNVGTWMLTTMNSNPKRRNLRLRFRDVKCNRDYDNEDSYEIYEPPAPTSMTTRRIHDSLENEFGIDNEDDDYQYLLASSLGIRSFKNSSLNPEENEFNLTALENSSEFISPSTDRVVDSNSSRILSKIINNNLKDFQRTLPGSGATVAGTLLRNLIGLDENFVLNSSTEHRSSSYHENDMENPQSNITMVYLLPLGPKGSGNREQDKPKTIKTGRPHMMKHRFSWMKAPAGKTGRHSNPKNSYSGMKSEEDIPSELIPLKQKITSKFLNRRWRVASEKGSYEIIAANGEDTDVDKLTNSPQNQNITVPRGESTSHTNTTRKPSDLPTFSGVGHKSPHVRQEEENSGFQKRQLFIRTRKKKKNKKLALHSPLSPRGFDPLRGHNHSPFPDRRLLNHSLLLHKSNETALSPDLNQTSPSMSTDRSLPDYNQYSKNDTEQMSSSLDLYQSVPAEEHSPTFPAQDPDQTHSTTDPSYRSSPPELSQGLDYDLSHDFYPDDIGLTSFFPDQSQKSSFSSDDDQAIPSSDLSLFTISPELDQTIIYPDLDQLLLSPEDNQKTSSPDLGQVPLSPDDNQKTSSPDLGQVSLSPDDNQKTSSPDLGQVPLSLDDNQKTTSPDLGQVPLSPDDNQMITSPDLGQVPLSSDNQKTSSPDLGQVPLFPEDNQNYFLDLSQVPLSSDQNQETSSTDLLTLSPDFGQTVLSPDLDQLPLPSDNSQVTVSPDLSLLTLSPDFNEIILAPDLGQVTLSPDLIQTNPALNHGHKASSADPDQASYPPDSGQASSLPELNRTLPHPDLNSHTHLPSPSPTLNNTSLSRKFNPLVVVGLSRVDGDDVEIVPSEEPERIDEDYAEDDFVTYNDPYRTDTRTDVNSSRNPDTIAAWYLRGHGGHKKFYYIAAEEITWNYAEFAQSEMDHEDTGHTPKDTTYKKVVFRKYLDSTFTSRDPRAEYEEHLGILGPVIRAEVDDVIQVRFKNLASRPYSLHAHGLSYEKSSEGKTYEDESPEWFQEDDAVQPNSSYTYVWHATKRSGPENPGSACRAWAYYSAVNVERDIHSGLIGPLLICRKGTLHMERNLPMDMREFVLLFMVFDEKKSWYYEKSKGSRRIESPEEKNAHKFYAINGMIYNLPGLRMYEQEWVRLHLLNMGGSRDIHVVHFHGQTLLDNRTKQHQLGVWPLLPGSFKTLEMKASKPGWWLLDTEVGENQVAGMQTPFLIIDKECKMPMGLSTGVISDSQIKASEYLTYWEPRLARLNNAGSYNAWSIEKTALDFPIKPWIQVDMQKEVVVTGIQTQGAKHYLKSCFTTEFQVAYSSDQTNWQIFRGKSGKSVMYFTGNSDGSTIKENRLDPPIVARYIRIHPTKSYNRPTLRLELQGCEVNGCSTPLGLEDGRIQDKQITASSFKKSWWGDYWEPSLARLNAQGRVNAWQAKANNNKQWLQVDLLKIKKVTAIVTQGCKSLSSEMYVKSYSIQYSDQGVAWKPYRQKSSMVDK

SEQ ID NO: 80 - DNA, 72409 bp, Homo sapiens
gaaaaagcggagggagtgagagccagaggctgctgctgccgtttgcaagaactgcaggggaggaggacgctgccacccacagcctctagagctcattgcagctgggacagcccggagtgtggttagcagctcggcaagcgctgcccaggtcctggggtggtggcagccagcgggagcaggaaaggaagcatgttcccaggctgcccacgcctctgggtcctggtggtcttgggcaccagctgggtaggctgggggagccaagggacagaagcggcacagctaaggcagttctacgtggctgctcagggcatcagttggagctaccgacctgagcccacaaactcaaggtaactcaggtgtggagtccgggtgggcttctctagagaggaaaatctatttcttttagagaacattccctttgcaatgtcatggctttttttttttttaacttcaggtaagtaaatataactaataggagagtatactgaattaaataaactgggcaaatgctaattttgcatccaacaatgtagtttatcattctgagggtttagaaagcaccctatttgattggttagatgctaccttcttttcaagtttattttcaatacagttttgttagtatgtttgtgttggcttatatattggttaattcaaaggcaccaggcacttgctccctcattagcccttcctgcaaactcctgttccagatttttagttgtatagtatttttatgagactcctagttacatattatttattccattgtctacatagcttcatcttctaaaactaaaaatgaacaccttgtgctttttgtcatataattttattgctgccttataaatgactttcaaaatatcatcagttcttgtatgtttttgtactttcaccttttttctgcttcatatttgacttatttatcctattgaatgtgactcttcatttttttttctctctgttcatcatgtcctgggatatggtttaccttggctacttaaaggcatatgtaactgagaggaggtttaattcagataaaatactatccttgagttgcaaactattttttctaattgaaatgttaaaaataagacttctcagaaattaactaaatcatacagtctattcaatatttccagttagttattttttaaatggtaaacctgctagtgtgactcactttttttccttacatcacacttcattatgaaagatgtgttcctcttttacaattacaaaaccaaagtaatctgccaaaaaataatgtaatattttgagatcttttagtgtataatattaacctttttaaaactctcattgtaactgggttattttggagggtattacataccatcttggtcttataataagaagagatccctccttctcaaaaataatcattttaaatatcgtacttcaaagtgataatctaggtcacacccacaccctttgggaactgccgtaagctaaaaccccaaggaaaataacagtccttctaacactaatcttgcctgctcatgagtagaatgcagacttggttgttggctttcttgtagcatgctgggttcatgcttgggagttttttctcttgtctgtagttagcgttgaaaataacaagcaaaataccggaggcagaaccagatagggcaaaggtctgattcacatggtgagtacacagggaaccatgactggtcattctgtcccctcatcctgtgggtaagtttccaaagttctggagattcgttcctctggtagcaattgttgagtcaaaaccatagaaacacaacccagacaaactgtcatattgtttaaccctaaatcatatcatttctctctagcattttcttatgaaaaatctaatccatatatctggctgcttaaactaagaacttgttctaacttgtcctgcccctagagctatgatactcactaggtgaatatcaacatagccaactccatcttttggcaaagtgtattttagcacaaagcagacatctatctacttatttcatataatattagcaggacaatgccttttaaaggtaaaatgtatctattattcttgctccaagtctaaggtgaacactttcaaaaatttccttagaaaacttgtttagtcactcacatgtatacaaagagatattgaagaaaagatatacatacattttccttctagggttctagctttatatgattttgtgattatgaacaaatcatctttaaacaatccttataaatgaaaaactcgtcgtacacattgtttgaattcatatgatctgtaactttttaatcagatagattattttccaatagaaattgttcagatcaaaatagacatacctcagtatgaatacacagcatacatagtaaaaacatgttaggaaacatctctctgttgaaattactccacgtaagagactgatattttttagtaaagattttacaccatcatctacatttctgtattaaagatctggggcaggggaggacaataacttttcaattgtactaaaaataaataaataaaaatggacttccacattagggacattagtatatagaatcctggaattcttaagttagaagaatgctaagagttcatttaattcatattcaacttccacgctttaaccttctacttttcccctttccctcagcaccaatgaccttaccaagtagttgtctaatttctacttgaatgcttccagtgatggagaatccactaccttctctatctagctattctaaaagtacttacgtgcctcctttaattctgcccccacatattaacacagtttctgtattccacatattacaatttgtgagcattactgtaactacagatttgtttttgctttctgagaaaacctgaagggtaaagactaactcttattacatttacaaaataatattactagctaacatggattgagtatttctagtgtgccagctctatgccttttgcacatatcaacttatttaaaattatacaacaattctgtgaaggagatttcagtattaatctcatttcatagttgtagaaactgaggcacaaatggatgaagtaaacttttcaaagtaaaacaataagaggtagatataggcttcaagtccagagatactgaattcacagcctgcaccctagccaccgcgctgtatagaagtcatggcatatgtgggtgctgttatgtcttgattatggctgggccactgtccccacattaggaagcaaaacaaagccactctgatcaactgatttagacatttgcaaggtattttctccaaattctctttccttttaccctcatctttgagtttaagacaaggataagactgatttgcctttagaggtacagaacaataacaacaacagcaaaaacaggaaagtaacccaccactcacaactctccctgttgtctgtcctctctctaattttatttaaaatcatgaatgcagtggtttcacattttttaatcttggttctgccacttatcaactgtatctcttggacaagttactgactctttccaaaacagttttttcatttgtttgtttccaatatgaatcccagggcttttaccccattagccatctctcacctctcaactagaaataaattccaccaaatcaatactttttcacaatgttccccagtagattaaaactatatttgattgatcagttgaaaaacagctcatatatttattcataaaggatttggtcatattttaatcatataaaatctaaacctacagtttgggtttctactgtgatattgggttctttttagaaaattgattctgaggaatgatattagggtagattaacttgtgaacaaatagttatcacaacaggatatttttgaagagaccaataattatttcattaactttacttattgatcatatttataaaactgtggacttctgaaatacaataaagatactggtattctactagaagtctgaagatatgagagatctactttttttgtaatgtgagaaatagatattgaatatgcctttcaaattagtttttgtattttatttccagtttgaatctttctgtaacttcctttaagaaaattgtctacagagagtatgaaccatattttaagaaagaaaaaccacaatctaccatttcaggtaagcctgaaatatacttttttaattttaaagataaatttctatgggtaatttggcattcacatgcatctaaaatatccatttactgaaaatttatagaaacgtgtggttttttttttaagaagtactggctacataatatgtggggcccagtgcaaaatgaaaatgtgagtccccttgttcatattattgaaaatttcacagtgactgcaaagcattaaaccaagccaggggccctttggggcatggggccctgtgaaactgcccaggtcacatacccatgaagctggctctgtttttaaccttgattaaaataactaaataaaacttataagtgtttgaatttttattcattcatctaaaaaactgttattgagtacctggtatgggctgggcattgaaataggcattgtggatgcaatagtggacaagacagtctcatatcctgggttcatggagattatggtctagtttaatgagcatagatgtgccttcgcaaaatgatattttgcttccatttggctccctagattcattcaaaggaactatgtatggctgactcttttgcatctctttcccgtctattcttctgtttatttagtgtgatatatacaatagccataatttttaaagaaaatctcttattttttcctcatctcttcctttatcaagaagactgggttgaatagggttctaatatcttaactatgataccatattccgcagggatgatagagaccatcaagggagaacttcctccagttgaatccccttgtcagtaattcacctgtccctttccccaatcagatgaagacctgctgtctttcccagaatcatcctagtctgtcctgcctcttctgatctcctttaatcttcaatatttagtcaatgggagtcttcctttcagttaaaaatcaacgactaaaccaaaaccaaatcaaaccatgtccagttaactcctatctagaaaaagaaaaaaaaaaatctccccttgaccctgcctgccttttccttttctctcctttccttcactaccagttttctgtatgagaactctgtatcattctctacatttcttcgcctatattccttccctaatctgctttagtatgaataagtctactaaaattactctcacaaaagggcacctaggacttgaggtgccagagcctatgttcttttactactagacattactaggacatttaacactcttcctttctgaagctctcgctttacctgttttttctagtgccacttccccttggttttctcagacttctcttaccactcctgctcagtatccccaccagatattcttccccagggttcgaatctcacccaaaaccaaggctttcactactacctacccagaagccactttccctctgaagctacattgacaccccctcaataccagcagaattaaatcttccctcttctatacatccccagtaccttgaattaatccctaccttctaaagatattaagaggatcaattgagttaataagtacaaagtatttataatgatgctgacacataataggcactcagtagaagttagctacattattgttattgttgctgctattactaatcataacttagatcatatatatcatagtattatggatatctatatatctatatttctccactcatttatatagtcttcacatgtgttcatttatatatttatttaattttaaacagatctgcatttaaatattcttttatttttaaataattgtgtattgaggccaggcgtggtggctcatgcactttgggaggccaaggcagatggatcacttgaggtcaggagttccagaccagcctggcccacatggtgaaaccccgcctctactgaaaatacaaaaattagttgtgcatgatggtacatgcctgtagtcccagctactcaggaggctgagacatgagaatcacttgaacccaggaggtggaggctgcagtgagctgacatcgcatcacttcactccaacctgggtgacagagcgaaactctatctcaaaaaaaaaaaaacaacaacaacaacaacaaaaaagtatattgagaacctactacattctaggctctgggataaagtgaataagacatggaccttgatttccaggagccaatcagctattggggataacctatggatagacaagcaatgacagtagagtaataaggaagaactatgatgaggattctgtagtaggacataggagacctatctccagtctggtggtcaggaaagtatttctatttctagattgatagctgaaaaaagagtaggatcttggaaagccaagtggggaggcaaggggttgggtgatagatgcattttaaaccaaggcacagaatgtttaaaagtttggaggtgagagtatggtatatttgtggaaccataactggatcagcacagttggaccacaaacttcagggaaggaattaacaagagatgcaactagatggggatcagggatccatgctaggctttatattgagaggaatagggagtccctaaaaggatttcagcaggagaaatatttgtcctttagaaagattatgttgtccaattatagagaatagattggagaaagaccagtccagagccagagaaagtagtcatgggactgttgtatcaatccagatagcagagaagctgagatggagtccaaagatatttaggagctaaagttgattaaacttggtgactcattagatgcagataatgaggaagaaaagggaattgttatggacttcaaggtgtctggtttgaacagcagaatggatagggtgccattcagtgagaaagaaaatgtaagaaaaggagatagtttgtgagagaaggtgataagtatagatttggagtctgaggtgtgtatagaatatctacctagagatgttaagtgagcagacgggtgtagaagtttggccctcaaaagagagatctgagctagctgtcaacatttgggagacatcagaacaaagatggcaaatgaagaatttagagggtgtgaactcacccagggaggatgtgatgagaagagaaggctgcagacagagctcaaagtagcagcaaagtccaagggatgagccaagaaagaaaagtttaccaaggagcttgagaaagcctgttcagggaggggagaagaaatctagagaatgtgttatcctggaggcaaagggtcaaatgctattaatataagggtcaaaatatggtccctttgttatggaatagtgggacaagaccagatggcagggtgttgaggagtgaatggaaggcgaggaaactgaagcacaagggtcttatagataactcttccctgaaacttggttccagatgggaggagagacagggtagtttcgggggtgggggtgggtactgaggagcttaaggacatttgagaattttataaaaaggaatacagagacttaaatatttaagggaagactctatagaaatgccatgaagtcctttccaatagaaaatgtggggataaaacatctgagagagaatgattaatggagacttagaagaagcaggaagcattgggattcaaaccttgggctggcttggccttaggtagaatggctaccaccttcatggggggccaggaaagcagaggataacgttgcaaataaaattaagtttgtagttatgagtaggaagttgaaggatgtcctgtcctatatcacagagtctattcattttcatagctccagctccaagcttagcatgtacaatagatacttaagaactatttaattaaattaaattgtaggtagatgaagggaatataaggtgggaaacatactcattagggccaggaaaagaggattggggccggtatttgaaggtgtaccttttgtggcttttgccaagctaagcaaattttaatccctttgctgtgtgagacattgtgctaaatgccataagagacggaaaggactaattccaggctgaagacttttaaacaataaaaaggcatggatagcttttgaagaaaagggttctgtgatcaaagtcctttcagatgattaaattttttagtgatttcctgatttaaccttgttagaggtagactctgacagttggtgagaacagtctccaatttatgtgtgaggcctttgcacctttctgtcaacccctgtgtatctcagaatatatttgtttcatgtggacaaaggtgtttcgacgtccattttaatgtaatctcttcctgaatgtccaaagttgcttaactatgaacttatgaagtgcaggagtggtatcttattcacctttgtaactctatagtagttgatacaaggaggcaaatctggcgtgaaggaaaagccttttattttgactgagaagatctggatttgaacactgccattaactatgtggcctctcccattccccagactagtcctgtgttatttgtacctttcccctatgtcctgctccactcatctgctgggtgtgattctagctgagccctgaaaaagtcatgagcctcactcctgcagcatgaactattgttgttgttagttcttgtaattgtagggggctgggctgtaggattggaggtatgaagatgcccatccaataaggtttgtggacatttgggcaggtgagggagtacagctggggtcatttttaggaattctgtcttgggctttaaaatggctagtcttggctgggcatagtggctcatgactgtaatcccagcactttgggaggccaaggtgggaggattgcttgaggccaggagttttagaccagcctgggcaatgtagtgagactctgtttctatttaaaaaaatacatacatatatatatatatatatatatatatatatatatatatttaaattagccagacatggtggtacatacctgtcatttcagctactggggaggctaaggcaagagggtcatttaggacaagagcatcacttgagcccaggagttggaggctgcagtgagttatgatcacaccactgcactccagcctgggtgacaaaataagacctcatctctaaataaataaataattaattaaattggctagttttgagtctgcatatttttcagggacaaattataaaatgtttgtccctgaaggagttttgaaatagctgcaacaatcactaccttgtgttatgtaatgcattgttcacctaagagcaggggattggattagttgaccttctgcagtcctttccagttccacaactgcactaaattgggtacatgctgtgctggcttccccaagccctgaagtaggccactcctttccccaatccagctttgggcactgaggagagggttagaagggttttaggccatctggctgttggaggagctaaagagcagcttgaaaaccatttagccatgtgttttcctacatgcgtgaaagtatttggtatgcatttatgaaaacatccttttgttttgccttaaatctgaagaagcaggaggggaggttgaataaatactccaaactgtccactgaagtaataggtcttattaggttaaataacttaggagactttctctgggcatctggtatttgcaggcatgtgatgccaacaaacaaatcaaccaagcaagagaaccatggcaactaaatgcggcacacaattggcagcatagtcagcaccctgttgggctcattggcagctggggtaggtgggaatagtcagtggaaacttccatcaggagccaagacagagggtagcagctggaagaggggggtcagtcagtggagtccgacatgtcaggagtcaaaagaggtgtagacatctggactattctataaagatgggggcctgagcctgccccgtggaaggaatagggagagctttggctcaggagtccagagatctgagttctgatcccagcaatgctaccagatcactgactgaccttgggcaagtcacctttgtcccccgattcctacctcccaggctttgttaactaaaataaggactgaactttgtgacctccacagtcctgtgtaaagctaacataaaaacaaacaaaaagcttcaggcacaagatcagaataaactccaggagtaggagttcaaggaaaggaataggacaaccgtgggtggcaagacaggggtagggaaagataggacctctgtcccagaaatcagagtttaccattgcttctgtaaccagttactgcaaacttagtggctaaaacaacacaaatttattcttttatgattatatatctgcagatgagaagtccaaaatgggttttattgggctaaaatcaaggtgttggcagagctgcattccttctggaggctctgggggagaattgtttccttgtcttttccagttactggaagctgcctacactcacgggctcatggccccttcctccatcttcaaaaccagctgagtagcatcttccaagctcttcctaactcagattctcctgcatccctctgataaggacctttgttattacatgggatccacctggacagcccagaagaatctcatctcaagattcttaatcatagatacacagtcccttttgccatataaagtagcatatttccaggtcccagagattaggacgtggacatctcagcaggggcacattattctgcctactacacccaccaaacaaagccctcccacggtgtcctccatctcagagaatggcaccctcctccacccagctccccaaatcagaacctcatcagccatccacagcaactgatgtcctttattctctaccccacatccaatccatcttcaagttccaactattttatctcataaatacatcactaatatattctctcctcatcatctcatcataatctcagtcaccaccatctctcctggagtcttctatctgttctctcaattgttctctgctcagtctcctccgagatcatcctccacaaatacagccagagattttaaaaccaaaatctggtccatgttgcacccctgatgaaaactctttaatggcttccagatactcttaggctaaagggaaaactctatgaggcttacaaagccctgcatgatgggactctgaggatgccttcggcttcaccttctgccccttcctttcacatactaagctccacctccccactggataactgtcagttctctaaaaaggccacattttctggcacctcagggcctttgcgcacgctactctaactttttagaatgtctttggccatcccttttcctctctgcctttggacctcagttaaaggattaattcctcgggaagggattccccaactcacctccaattggactagattccactgtcaaatactcttcagagtattccctccttttctgtcataatatttaccataggtttaaattgaatgtttttgtgatcatttgtttaaaatctgtctttcctactataaaaacgtataaagttatagaactataaaaatgtttgacttttataaactctatgaaggcagggagtgggtgtatctattttactcttttacgcaccattgcaattctgatgcctaggataatataggcacttgatattcattgaataaataaaggaatgaataaaggaatgaatacaaggtggaggtgtagtataaagaagtggcttaaaagtcacgatctagagacagacatattaaactttaaatcatgatgctgtgtgatattaggcaagatatttaaactctctgaggctcagtgtcctcacctataaaatgaggatcttaatatctaccttaaaaacttgtgaggattaatgtagggacttacagtgcttgaatgtattaagggaaacagtacaggaaagccttattatgattatcatcaccactgcaaacaaatgctggctgaactccatgagtgccgtgacttccttctcctgcttctaggacgcctaatggcgagaagccaatcccatgacacttgtggatggctcagaaatgacagtagttgatttctgtcacttgtctggaatggggcttttggtcatagattctcaagatttcaaagacatcaagatcaccaaggagcacacgttaaagtccagattcccaagtttcacctccagaactcagattcattgaggctgaggtgatatttggaaatctgcctcttattaagaccctaggtgattctgatgcagagactccaaggactacactttggaaattctagtacagtcatcccttggtatccacagggtattggttccaggactactcacagataccaaaatttgcagatgctcaagtcccttatataaaatttcatagtatttgcaataacctatgcacatcctctcatatactttaaatcatctttaaattagttataatactgaatgcaatgtaaatactatgtaaattgctattatgttagagttttatttgtattgtttttattgtttattttttattgttgttttttgaatatttttgatccaaaattggttgactccatggatgtgtaaccatgaatatgaaccatggtcatggagggctgactatatacaattcctcaaattctgactcagccatcaactttttccctaactccccagacagaatttgtgcttcatcctctcttcttctgtaatattttgcccatatctcagcagtcgctcctatcatacatctatctccaaactagcttgtgagttccttcagtacagggactgtatttgatccaggtagccagaaactttctaacacagtgcctggcatgtagaaagtaaaacctcattcttgatttctgcacccataacctcctgtctctgctgtgttctcccattgcagtaactaataacatcatttacccagttgttctgataaaacaccttgaggtcatccttgacttctgtctctcacaagccacatgcaatccatcagcaagtcttgtttgccttacctacaaaaatgtccagactccaaccactactcatcacgttctgctacatgtgctggcccagtacactgcagtctctttcctatactgcctaatctctctgcttccattcttgtccctacacagactattctctacacagcagctatgatgaactttttgttttaggatgaacttttaatacacgttatactatgtctctgctgtacaaagtggtttttcattttacttagaaatgctccatttcacttagacgaggcgtggtggctcacacctgtaatcccagcactttgggaggctgaggcgggtgtatcacctgaggtcaggagtttgagaccagcctggccaacatggtgaaaagtcatctctactaaaaatacaaaaattagctgggtgtggtggtgcatgcctgcaatcccagctacttgggaggttgaggtaggagaattgcttgaacccaggaggcggaggttgcagtgggtcctgagattgcatcactgcactccagcctaggagacagagcgagactccatctcaaaaaaaaaaagaaaaatgctccagtgatgtcccatttcacttagaagaaaattcaagttcttaccgtagcccatagggcctcccttgttctacacacctaccatccacctcatctcttctttcttcccgtactgtttttcttactgttccttagatacatcaagactactcctgcctcagagccagagagctgtgtgatttggttcctcaattcatctaggtctctgagcacacccatgtcagagaaatctaaagtaactaccctctcgcatcaccctctgtaattgaaatgaacatctttcttaagcaaagaaagttattgctaaggaatgacagtgggtcaaagtgggcaagacttggccagaactatttctcctactctgttgacttcttttgggtccaggacaagtgtttctaccattctattgtgatctgtgtacatgtaatgttgagttaatgagctgctaaaaccttctagattgaaaataagtgagtcagcctcaggaccaggaggaatggtagcaatcactcttggtatcatctgtttgtttttcttgcttagcaactctgcctttgatgaccctgaatacagacatagtttaaatatttgttttcacaggacttcttgggcctactttatatgctgaagtcggagacatcataaaagttcactttaaaaataaggcagataagcccttgagcatccatcctcaaggaattaggtacagtaaattatcagaaggtaagataaatctaatatttttctgaaaagggaaaatgtctaagtctttaataccagcatcaacatttaaaactatactgttaaccacgtgttgttagggaaatctcttgcaactggtaattataaaaattgttgctgttgtaagttttgagagaagaaaaggaaaaggttttggagtcctctagacctgcatttttcactgggttcttactctttaatgtttgggagggcaagttatctaatttctctgaattctcatatgttcatcttaaaatgggaataataatacatacattgaaagatggtttaaggcgggggtcagtaaatttttccgtaaagggccagatagtaagtttgtttggctttgcaggccataagatctctgttgcaagtactcaactctgccttttagtacaaaagcagccatagacgatacctatttttttggctttggttacagatgccagaactaattaactttgttaccgtattctttccctcaagtcatacaccagagtaagaccgcctctgacaatacaattttatttacaaaaacaggaaattggttgggtttggcccatgagccactgacatagtgacatagaactagcctgatataggcttcctggcacatagatgacactcaataagtggtatttggtggtggtgagactagaagcattaatagtattagacttttggacatagtgaagtggttaagaaagtaagctttaaaggcagacaagttaaaattctagctttatcatttctgattctacgactttagcatctctgagcctcagttttctcatctataaaatggaaatgattataaccacccataagattgcctgaaatttaaatgaagtcacttaggtagagtactaaacatggttcctgggatcggataagctctctataaataatgatgacaatgatggcaataatcataaagataatagtcatgcaagttattgtatcagccgctgaatagtaagtacctgatgttaatatggttctaattatcccattatgctgatgttcagatcattgtaagcatagtagagttccatcaggcactggtataaaaaattgtatccatattataatagttgttggtatgagaacattttaaaataatttcagacttttcatggttcacatttaaatatctttccttctacatgttccagccatcatacctttgagagaataattgagtaggagagtggtttatgtgcaggttttagaactagactaataagtgcaaatcctggctcagtgacttttatgaagttatttaacctctgtgtgcctcatctttctcatctgtaaaatggtaataataatcatgtctctgtcatacaggtttgttgtcgtgaaatcttagaataatgactggcatataacagataataaatattagccatgatagtaaagataattcttcaattaaaatgtgttcaaataatttagtatttatcttaaaacttgttagtttcagaaaaaatcagaaagtaatttttaaatttattgttttctatataaactgttgtcaaactcatacccactaaggtataagtgactgataataggtcaatgaactaccttccttaggagtacttgcattagcacttaatctttggcttgaggaaaaacaatgaagcattaactgtggcactgagatttcttccaaagtgaatttggcaagactctgggtgaggtagtgggaacaggagtttctcctatgttcttaaaatcatacagtgacatagtgaacaaccacttcacctacttatgaggcttctagacgactgcatcagaagttcagcaatgtaaagaagaagggggagaaacctcaaaatatcaaaatgtcacatgcaggtttcatttcaaataagggaggaggtaagaattgtagactttggaccctacctgggctgtttgcacagtgaatgaaccttgcaacactatccctcttcctttactgtttatttgtccctacattccctacagccagcaattatttatgagcaattgcttaaaatgctcccacagctttcactggagacatgattattggcatataatattgcctctggtcctatgaatctaagaaaggtaaatacatattggtagggaaagtaaaattttaccttggaaatgagatgcaaacctagtaagcagatagtatcttttatggtaaaagacaagccttataagttgattttattatgccctctgcattaaaataaaacatctcctcctccatgtctgacactcaccctcacctatagcctccctctgtggtttgagctatttttttgggagtggggataaactaactgcatgctgagccagttacatgagaatccagattcctctatctcagaggtagatatttgagagataggtggtagggggttaagatagtattacactggcttgagaaaccacaacagaacataagagaactctggataaccctttttgacagaatggacaaacggtgatttgtaaaaatgcttgtaaggacatttcctttaataatgtatttaataagactgtcttagatcagggaataaagtatctgcaactgtaactaatcacttaaaagctgtcactaaagggtttcaatttgaggttaaattttcagaaactctgtaactagcatgcatcaaattgacttcaatgctgcacctttgagcaaagtttgttgttcagtaaaattttcaaagtcgttttggtcaattacctttaaaaagcttgtttcatggagaatttaatattattcttttcttttagttatattctcatattttaaatatatgagttgcatatgaatgtgatgtcacaaaattagttctataatatatagccatctgctggtaagccagctctccaaataaaacacgttttctgccagacattgttcgttgtatctaagtgttgccaaattctctatacaaaaatttgctcttctagatttttccaaaacattccaatgcttgacttaatgtaggtgattacattttttcacttctcatctgaatattttggccttatgtagagacttccttgagtatatgataaacacctgaaacaaactataacggctatagtttgtatatttaataaatcacaaaaatgtggatcccttttccaaagagacttgcaagtcctgtgcaatgaaatcagctctttataaaacgtcagcattgattcgcccattgcctacattatagcttctaaaagaatattctgaatctttgaatgtagtgaagcattcactaagtttattaacttaggagaggaaaagagttgttcacaaaaataagtaacaagggaagagttactgagtgagcaccctaatgagtaaccaaaaaggctctttatgtaacttcactttcccaaagcttgtatgcaccatttttcatttttaaaaaatactgagagcctttggcaagtaattagtacatcatgacaagaataaatacaatacaaagctgactatcgactgagcaggaaatgaacagaactgagtaaatataaatgaagagctacccttgtgtaaagattttattccagcaagcagctgaacaaggacttcttgtgctctagcacaatagttgtccctgtccatttctcttcttttcagtttagagcttaattttttttattttgattacaaagtcaaaatcacattcaccaaaactgcatctcacaaatgcttcctcttaatagctgtttgtattttatactttatattaatgtatgttgtaaaatcaaagatacaacaaacctgttttattctagactaaaggtaaaataatttgaagtgaaaagaataaaagcattgataaaattacaccccaattgtctcattagccatctcactcagtgtaattatagaatatatcctatgtacaagtctatatcattcactgtttcaagatgctcataattcaacttttagtagtatactaaacttaattaacatcattcatttaattatttgaaattcatcttatatgtaactgacaggcgaatgtgaaattctgagtaatttagtttgatcaattagacagacattaatttgtgtgactagagtaacctttcattatctatctcaaaatatcatgtacacaagtatatacaataattttttaagcccagtatgtgttaaaataaatctaggtgtgaaacattgattgtttacagataggttcaatattgttagaaaatcagtcaccctgctatacctagcacaagtgttatagcatcttgggcaatttttagatacttacattggttggttctcattccagattgacagtgtgttctaattgtagccctagaagaaatctagaggtcaaacctatcacaattagggcaccaacatgtaccctagagttaactaggcagagcccctcaggggcccaggccctgtcttctttacatttgtactctggcatttagcacagagcctggaacctagtggatgatgatggtcatgatcatgatgatattaatcattactgaactaaactgaggggccgaggactgattagaaagtaaggactatgcattatttttcccttgctttaaaattattgattttgctgataattttgagcaggtactttgtcttacttattaccaaaaaaaaaaaaaaaaagtacttttaccaaaaaagtcttatttactttcatcgcctttggaatagatacatcactacaatggattggaagtttgtgtcctccaaaaattcacatactgaaatctaacctccagtgtgatggcattagcaggtggggcctttgggagatttttttttattatactttaagttttagggtacatgtgcacattgtgcaggttagttacatatgtatacatgtgccatgctggtgcgctgcacccactaactcgtcatctagcattaggtatatctcccaatgctatccctcccccctcctttgggagatttttaggtaatgaggatggagccctcatgatgagattagtgcccttataaaagggaccctctcactcaccctctttctaccatgtgaggatacaaggagaagatggcagtctacaacctggaagagaccctgcaccagaacccaaccatgctggcaccctgattttaaacttccagcctccagaactgtgaggaagaagtgtccgttgtttataagccactcaatccagggtactttgttaacagcaacccaaactaagaaaatcaccaatttctatcttactcacatgtgttaccagaactcaagcacacttaagatctatcttatctaaagtagaacataaaggaaagaggctgtattaattgcaacatgactgggaaagaaaatacttaaccaaaatgtgaacatgtattcccacaggctatcagagcatttgttaggagccagaaattttacaaatattttccagtcttcataacccatcaaaaaggataaagttatctctagaaaaaggattatattatcttaaattataaatgaaaaaactgaggttaaagggacttcaagaaaccttcccaagttcccacagttagcaaatgatacaaccaccaagatattttcaactctgaccctgaagttcaagtgctttctcccactatctagcagaaaaaagtatcgttaaccatatagtctcacaaatactgaattacaaatggcgatgagtgctgtcaaaaaaccaacaacaaacaaacaggtatcacaatcagagatcaagaagggtgtaagatgatatttgatctgacatctgaagaatgagcacacatttacccagaaaaataaagggaggaagaacttcaaaagttatctcctaccctgcaaagaatataatgttttgcccttaggggagcttgtgaaggcagtggaaagaatatcattttctactatagaaaccccatgtgatgttttaacagttgaaacagtggaagctgcctgtccagaaacatcatttttcaactttatgaggccatgtagcaagaagcattgaagaagggctgtcatgcttgattcaaggtagatggtgcagctcatcaactagccatgctaatttcagttaatagacaagttctgacctgagagggcaactctccttatcagtcctgtttgtgctttgttaccaaagctcttttgtaatctttcacagataatgcttcctgcttattagtggagactttctccataaactttttttcttttatagactagaattatgttataacttacaggaagtgacttaagcttttatcatttctcagctcttgacagttttattatcaaagtgaaagtacagcctagagtaaatattagttattagtgtcaagctatcctttggggtgtgttgggggaagacacaacaaagtccactttatgctagcgcaaagttcacaaactcagatgcctatagtagccagataagtagttcagtgaacaaaattggtccagtaagaactgatcatcagaaagcagaaaagggcagctaagatccagatccaacaaaattctgtgcaggagtttggtcctgttgttaaccagatctccaggtttttgttttttaaagagaaaccagtaatccaaattcttatataatttctccggatgtttaatgttggcatttaatctattttaacattacgcaatcataacaacacacagccatgagctttgacttgttgacctaggctgtagcccataggaccttaaattttaggagtttaataaatattcactgagcatcttcttcatgttcatgttccatgcttctctaggtacctatggaaggcaccagagacactaagacaaatacaatccagcacttttccttgaggaactcacacttgggtgaccaaaatgtgcaggacacaaatacttatgatctagtagaagaaaatgaattagtcacataatctcacaggcatttaattacaaattgtgatgggtgctgtaaaagaaaaaaatgtgtatcagaattggagataaaggtagaagtgaacagatattcaaggtgatgtctgaatgatgagcacatatttatcaaaaggaagacgggaggaagagcactctaggcagagggaatggcatctgcaaagaccctgaggtaggacagaacttggatgtctggggaactgacaggggacccaagggacaaggagcccatagtaaacaagagaaaagacgtatgataagactgaagagagaagtagaggtaaatcatacatggacttgtggtccacgttaaggactttatgcaagaagtaaatctagatatacctactcaacttatggtttccatgctcagaacctcatgagatacattgcacgttactgtagtacctgaatccttcattgctattgaatggatgtgccttattttccactcccacctggagaatccaaacatatgctgatgccatgcaaactcatgcaaagcgttttgagtggaatagattttccacagttgggatggggaaaggtacaattaaagaagggaagctgacattgctgtaatgtaaaaaaatattttatatggaaatttagcatctcagactttggcttcagaacataaggaaccagatttaccctttttctcaacaactagacaggcagacaaaacatataaaacagaagttttcagacatcgaatgacagacaactcaagacagtaaaagaagagtaacaaaccagatgtgccctatgagcacctaagcttactgcttgaagagtgtttccagggaacagcacaagcagggagaacccagacagagtctctatgggttgaggaaatagagtttggacttcggagaagctcaaatggctagaatttgtgattttagggcagagtcctgcagaggacagtataatcacagagaaagagctctagagaatctacagagaggttttgtcaagttgaatactgatctgcacatacatgtgaggaaagtactgagggtaagaaaaatgtcacttgaaaggaacaggtggaacagtccctggaccttactcagggccggtaatcgtttatgttcctaccatcaaacatagaaagacctcctaataaatgagcactggatagaattgtcagaaggatttagaaacagtgggtggataaaattagactacaggctgctgaggaggcaacagaataaaaaacaagatttgatttcaagtatcttaactgtgaataaaactcaatactagttaacaagaatgcaacaaacaacaatgtaaattcacaatgttaataaaaataaacaagcattagaagaagcagaaagagatgactcataaccaagaaaaaactcaacagattgagaagtgaaagagagaatagaagcagcaggcagagacagtaagacagctatcataaatcttctcaatatgttccagaaagcagagaaaagcatgagcatgatgaagatagagaatataaatatgcatacacagaacttctgtagatgaatacaattgttgacatgaaaagtaaaaaataaagcatagaaaagaaaggtaaaaaataaaggataaaaaaatatattataaactgaaggataccactaatacaacaaacactggatgaaattaatagcacattagacactgtgaaaggaaatagtagaaaatattaatacattgcaatagaaactgcaaagtgaaatacagagattaaaaaggctgaagaaagtgaacagagcatcagtgaactgtgggaccatatcaagtgatctaacatatgtgtaattggatcccagaagtagcaggaacagaaaaagtatttgaagaaataatgactgaaaaattcccaaatgtaatgtaaactacaaaccaacagattcaagatgtttgacaaaactaagaagaaggaacatgaagaaaaccacaccaagccacatcactatcaagttgctggaaaccagtgataaagagaaaatattggaagcagtgagagataaaaacacacaccacatacaggggaacaaaaccaagaaatgatagcagacttatcgttagaaactatgcacaccagaagacaattagggacatctttaaagtgttgggagggtagaagataggggaatctgtctgtttagtattctataccaagtcaaaaagtcttttttaaatgaaggcaaaataaagagtgttttagacatacaaatgcagaaagaatttctcactaacagagcagaaaaaaatgttaaaggaactcctttagatagaagaaatattatgtcagagagacatttagattcataagaaggaatgaaaagttccagaagttgataaatatagagaaattttttcctcgttttaatctattaaaaaggcaattgattatctaaatgttaaagcaaaatagtaacaatttattgtggggtatattatgtatatataaataaaatgtatgacaatagcacaaaggctgggagggaagaaatggaaatatattattgcaaggttcttacaagtgaaatagtataatattatttgaaggaagtttgtgacaagttaaaaatgtactatatattgtaaacggaagggcaccactaagaaaacaaagctaagaaggcaacaatggagattaaacatcactaactatactcaatccaaaagaaaacagaaaggaaggggaaaaggaataaagaccagatagacaaatagaaaataaatataaagatggcagttttaaattcaaccatatcatcaattacattaaaagtaaatggaaagaacactacaattaagaaacaaataagattgaataaaaaagcaatgctaaactgtatgcagaatttaagaaatccactttaatgagagagacaaagataggtaaaaaataaaggatagaaaattatataccataccagctaacactaatccaacacaaaagggtgtgtaatgatgattccattgatatgacattacagaaaagccaaattatagtgaaataaagcagattagtggttgtctgggcccagagggcattggctacaaatggcatgaagaaatgttttggaatgatggaactcttctctatcttgattggaactatagctataagactgggtaattgttttaatcaaagctcagcaaatattatacttaaaagtggtaaatgttattatatgcaaattatacctcaatgaggataatgaaaggaagaaagagagggaaggagggtggggaatagggaaggaagaagacaaagaaaggaagaaaggagaaaagaaaagaaactaggaaaggaaaaagaaaagaaagggaagagaaaggaaggggagggaaaggattaatcatttcagttttcaaaaagtgtagttgcttcagtaagaggagttttattggccttttaccccatcatgtaaaacatttcaggcttttttccccagatccttgttgtctgcctacatccacactgatgttctcaccttcttctcgtaaagaatttatcaagttattgtaccaaacaaaaataactgcatcccaaagagaaattctgtcaccagctgatgatagggaatctttcacctaattaaatgaggaattcctcaggcagaggaaactgttcattccacttggctctctatggcactcacctctccccttcctgacctcacttgctccattttattattgaaaacctcacccaaccctctacacttcttttaatattgagtatctcagttccttctcttcaataaagaagaccaatttcttcatcctctccctctcctatcagtagggaaagtccaatatacatggaggtgttaatgatgtgtctttgggtgcacaaagtacaaagtaagacatctaagtttcaggggatggacacatttcatattcatacagacaaccagcctgcataggggagttagacgctgtggctcgggggaaaaaattgagataatcagatggctaagatgaaataaagagataaaacaaagctgaggatcacagcagttggaaagaagatctgaaatagcaaaacaaaataatacataaacagctctgactatcctcccatctcatgttaataggctaagtatgtcttattaaacaccacaaagaagatatcacccattcttatattctgagatggtttactaatcaaaggcgattcaattctctgattatatttaaataataattgttcaggtaccctggaaaattaacttgctaaactttaatttacaaataacatttgttattcttaagatcaccatgttatcaaagcctttgtaagtacatgagcatagaaatgggcatatgtgaatctttccaaataataaaagttcactattgaaggacatatgcatctccagagaactcatcttagctatccccagatttgagagtggtgaaaacgcaatcctcagaaactgcccacatgtcttgatggctgttactcctccaggtgcttcttaccttgaccacacattccctgcggagaagatggacgacgctgtggctccaggccgagaatacacctatgaatggagtatcagtgaggacagtggacccacccatgatgaccctccatgcctcacacacatctattactcccatgaaaatctgatcgaggatttcaactcggggctgattgggcccctgcttatctgtaaaaaaggtaagaacacccccaccaaaagattcaacaactaaatgttggaatggtcaggagttctgtcatgggacaaagcttgggagcatcttggtaacttcttgtacatcaagcagaggaagacggcacggagaccagatcattgtttgacaagagaaaaaaacacctgctatttcagggtgtggatccacctctgtttcttctcattcctccttcatctcagtccttaaggttctcccaggcaaattcctgtttgagagtatgttctgatgtcatgcttgtatgatctgtaacatttacctcaaggccaaagtcttttagaaagtatacagtagcctatactctgctgaaagagctcttggaaagaactttggctaacatgtttgacatatctgaggtttgggctggtaatttgctctataaacacgtgaaatgccagcttcctttcttacaaacaagttgaaaactttgggtggtaggtttcaaacacactcaagtgactttacaagaacttttattggctgggcttcttaggagcaagcttggattttcattttatcccatgagaatccagcccatctttcattaaaacaaacaaccacagtgagccacagcatgggaaataacgtgatggactcaccatctgcctatacatacacgctcaggccatacctacatacatgcccaatgtatttactcattatacaaagactttttttccatttcctggtatatataagatactgtgatggtactgaaaaaaaccttaaaacttacaaaagactcttcttgcattttaccatcagcagcatgtttttctcatagtgagaatggattaatgctgatacttccacccaattatctaatgccccctttcatatacaaataagatgacagcattaaacttggggcatgatgcttttaccaactgagctaacgtatctatatactcttctattgagactgggggaaatggatacttgtacagagtcttgagagtcaccaaatgttttcttcccaagctggatgaaataaagcctgttccccaaagcaagaaggtatcaaagaagacagtgtggcaccagattttaaataaccctagaaccattattacttgataaatatgctattttaaaaaataagaatttcttcaagttgaaatcattatggttgattgcttgccctaaactctttgctatccaggaaagctaatgagcgtcttctatctgcagtgctactgaaaacatgtctttcctttcatagggaccctaactgagggtgggacacagaagacgtttgacaagcaaatcgtgctactatttgctgtgtttgatgaaagcaagagctggagccagtcatcatccctaatgtacacagtcaatggatatgtgaatgggacaatgccaggtaacacgagggctgtgtaccattaaacaacagtaaaatcattagtaatttttcggtcctgttttcttcaaagcactagagaagttgaccatactcactgttttgcaactccctatcaagaaggaaatattttctctttttttttttaaacaggaaatagaagagacaaattagaagctagagaagaaatgtgcagccttgttaggtatagtgacctgagtaggtttcaccttggcctgtactttgaataagaccttaaggtatcagctcagccactctctccgagttctgcagttcctctatatgatgaccatggcttcttcaaggacaagccctagcaggaaggatcagcaggaagattgcagtaaagatgaacagattaggagtaatcctcaacacacaaaaaaaaccagcatttcaaaaggtgacagaagagtaatattcagtggcatctagaatattttctctttccatttgcatttgggcacttatgagaaggcaaaatcatagcaatcgttaagagaaaaaataactaattcccacttagaccacatctcttctatttctctctggtagaactgacctacaactaaagatccagggtatatgatactagcctgagggaaaaacattaaaaaattaaaatgccactttactaaataaaccatatttcaaaacactaaacttcttagaggttattctctaatgccatctgaaaatcacaaatagcttcacttactaaaacacaaatattgttaagagttgagatctgggtagtgtttttaaattgtattctatttcatttgactacattttccacttggttttctgaaaatatactcatatgactctcaatgttgatcccaagttccaatactaggagcttgtaaaaactggggcttagttaactgacctcgaccttagataatctgagttcagacttcagattatcagactaccttctgtggccctggataaattagttgtctcaatgtgcttacttacaaaagtggactaaccatttatcctaacatctatttcctggcagagtgaacaatctgtataagtatatggatgccaagaaaagcaaaaccatatgcacaaaaataaaaataaattgatctgagcttagagtttacgaatttatagttcccaaaagaataattgggggtaaatgggacaaggtagggaaagaccatcagtagaaactaagaatagtaaacatttgtaaaaaccctctgccttataaagcagaataaattgaatacatatgataaatgctaacacagatatgttaattgctgaactcaatataagcatttctttggcatggataaacgcttccaccaaagcctcctagtgatgcaaggaatcctggctttgttgcaatggtctcctaaaaaaaacaagcctttgtgtgggtaaggaactgattctcagccccattatctagtatctagtgattatgtatctgagatgtaaaacagaaacctaaaagccaaggatggagtctccccacagagcaaatgagcattttcccagtgactgtaggagcaaagaaggagcaaaactaagtttttatattcagttatcactactccttccatgaaaagctcccaatggctcagcataatgaggacttgtacactgcattttaaggagagtgtgtaaccccaaagtgatttcgttgacttgtcattaaaacaatcaaaaagtaagtaaaaataacaattgaaaatcctcacatcatcttcacatcttcttcccttaggcagagcttcgaccactagagctagagagctgagaggattaagtgcttgaactcagccctattggcggttctggtgatttgactccctccagctgagatcagactggggtgaccaaacattccattttgccgtggactttttaccagttctaatagttaaagtcctgaatcttgggaaacccctcagaccagaacagtcggttaccttcttggttcccttcttggcctaatcctttagcaatccctgtgtttttgagttcacatccaccatctctaagctctgttgttacctgtataatgccatttatcacaatgagttgtcactgcttgtttgctggtcactcagatgtctgcttttgcagggcacaaactacaactggagtgtctgttccctcaaagctttatacaatgcctgacacacagcaggtgctcaatacacttggtgagtgaatgtttgatcacagagtacttgactgaatgcttattttggcctgtgtctctccctctttctcagatataacagtttgtgcccatgaccacatcagctggcatctgctgggaatgagctcggggccagaattattctccattcatttcaacggccaggtcctggagcagaaccatcataaggtctcagccatcacccttgtcagtgctacatccactaccgcaaatatgactgtgggcccagagggaaagtggatcatatcttctctcaccccaaaacatttgcaaggcaagaaactctcctgacagtcttgcttctcaatgcagaatcctttcttcccatgcactaactccctctttctcccttgccctttcaagccacctgcaccgcagacaaactttcctcagttcctaacaaccaaacttagatattttgctcttagatttataacttgctctttggggatggagaaagcgaaggaattggcaaaggttttttttttttttttttttttttttttaattaagcaaaagctaaagagatctctaacttcctcgaaagaagaaaagaggaagaaaacaaatgcatacatagagatattctttcttcgggttacttcatatgcaaaaaagacctagatgctagcacaagacaaactgcaaatttacagaagcactaagttgtagaaagtgtaaaagtttagcatgaaaacattaacctttacagtgggatgaacacaaagtctagcacagagaggaactcaatgaatgtgtgttgaatggatcatacatggcatatactgaggggtgagctccaaagaacactggggaattcaggtgggaaaataaatcaacccacgttatgtggtatcgtgtaaacaaaataactgattgttctactacacatttttgctttaaaactgttgagattagagttcatataaatggagactaaaatctaaggaaatgatatcacaataggaaatcattttgttaccaaaataatgtataagcaacacatataaggaagagatacttcatgagatcatttctgtttcttttcacacgagtagtcaaaattatatttgaagtaataaaaccatcatgatatccgtggaagatagagttcccaataatattaaaacaacaatgtaacttttgtttctttgttgaggataagtgcattatgtattgttattaatatttaatttttaacaacaattttattaggtactggtgctacttcattttatagattaagggacagatgacagaaaaatgagaatttaacaagacttaattcataaggtcttaagaagttaaaaattattagaaatttgcctgctcaagaagaaataaagggaatctttccaaattttttccctaacccctcctccttttcccccttttaaaattcttgccttttctggatgccacttaaagagttccaaactaaaatgttcaaaaattgcctgagcattactttcactcttattatattaatataaaccttccacaagttgatttaaaggatatgcatttcaatcaaccataatttcttctcttgagttatttcattgtctttctgtcctaactcagctgggatgcaggcttacattgacattaaaaactgcccaaagaaaaccaggaatcttaagaaaataactcgtgagcagaggcggcacatgaagaggtgggaatacttcattgctgcagaggaagtcatttgggactatgcacctgtaataccagcgaatatggacaagtgagttgttggggttcataccactgggcaaaggttcaagacacattccatagggtcctagatgtttggggtgaaatgtaagttcacagctctcaaggggacacatgtattggtttctattcaagtctttttgtaaaaattaatcttgaattacccccaaatcaccaaagaaattcagcctaataataataaaaatgacaacagcagctaccttttgttgaatgtttgccattgccaagcactgtattgtccctttctgagagcttcgcttcaactctacaaactagatactgctcttatttctttttatagatgaggaaatgggtctgagagattaagagatttggaaattcaaatagctcttaaacccttgaaaagttactcaaattcactcataataacagaaatgcaaattaaacttcatgggaatactacttttatctatcacattcacaagtccagatgacatcatctgttgacaaggctgtgagaaaaaagaactatcatatattgttcgtggaagattaaattggtaaaaggattctgaagaataacttggcaatatgtatcaaaattctaaatgcatataccctttgactcagctatctcactctggaaatctaactatacagatacacttgttcacaggtgaaatgatgtatgtacaacatattcactgttgcaacgttagtagtagtaagactggaaacaacccaaaatgtccatcagtagaaaactagtttaataaattaggatacattcatacaatggaatactaagcatcaaaaaaagaggatgcaaacactctgtatgtactaatacaaaaagttctccaagatatgttattaaattaaaaagctgggatgtagtatagcgtgtatacatagctgccttttgttaaaggagtgaaagggataagaatatttatattttcttatttgtaagacataaaggtattctggaattacacgcatgaaattaatatatggctacctagaaaattcagggagggtagggaggtcattttgagagtcatcagagaaaagtgagagttttcactgtaataaaaattatgtgaatgtattttctattaaaaacaattaaactaggaaaaagaacaaaaaaaatttggccaagattatagaattgttgacagaactgagataggaatccaggagtgtttggcaacagtcagtgctttccactgggaaaaataaattcataaaatgatattccatcttaaaagattgctgggttaaatgatatttctgactttaggtcttggaggaactgccatactgtcttccacaatggctgaattaatttacattccaccaagagtgtataagtgttcctttctctccatgaccttgccagcatctcttctttcttgacttttcaatcatcgccattctgactggcatgagagggcatctcattgcgtttttctttctttttttgagacggagtctcgctctgtcgcccaggctggagtgcagtggcgcaatctctgctcactgcaagctccgcctcccaggctcacgccattctcctgcctcagcctcccgagtagctgagactacaggggcccgccaacacaaatacaaaatacaaaaaatataattttttgtatttttagtagagatggggtttcaccgtgttagccaggatggtctcgatctcctgacctcgtgatttgcccgcctcggcctcccaaagtgctgagagtacaggcgtgagccaccgcgcccggcctcattgtggttttgatttgcatttctctcatgaacactgatgttgagctttttaaaatgtgctttttggccgcatgtagttgcttttgcaaactaaggtaataaagagggcaggggaaaagtggttcatgtttctgctcccaaagtatttatcccagtagctacaaaagatgggtgaaggaggttgcttttcagtcagctcagagaattggctagatggtggaagagatagcccaatagcacagaactatgattaacaatgctagtaaatgtttcctggggttggaagttgcttttagggattaagaaatacctttaaaaccaaaaaggctatcatagaataagtgataggacagactttagaaaaattcctagtatcttttcagccagtataggccttttcccagagatatcaaatgtctgctgtagcaataagaatgacaggaagatctaagtagctgcttctaaccagttacctatgacttttatcagtgatgcaggagacaaatcagaagtttccagttttccaactagacagaaaacataaggactttgcaaactacactaagaaatttttagagaactagtatgttagctaatctaagagcagaatgtttaagcacaagggtttccccatcctaccgagatctctatttgagaaagtggtttaatttttttttacttcactttaagaaaatacaggtctcagcatttggataatttctcaaaccaaattggaaaacattataagaaagttatgtacacacagtacgaagatgagtccttcaccaaacatacagtgaatcccaatatgaaagaagatgggattttgggtcctattatcagagcccaggtcagagacacactcaaagtaagtaacacaaatacagaatcatgggagaaattacatagtaaaatattatggagtacctggttattttttaattttaaaagaaaaagatgctcatataattttaaattcaaatgcaacttttagtttttatttagtatttgtatttatttacagcttactcagtaatacaaaggatctgagacagtttctcaagttataaaggcataaaacaaggagtctatgtaattgggatagaatatgcggacaaagaaaataaagccacagataagtagataccatgtgaccctgtaaggctgtcttcaaattttgtcctaagctttatggcagtcagtgtaaaaaaggaaatatgtcagggtgaagtttacatcatctacaaaaagaaagcaccatttatcctgatgttaagatctaagaggaacttctttaatgagttctacaaaagagagtgctgagtgatacagtagatggcatccttgataaaattcttataaccagcataatagattaaaagttgcataaaataatagattaaaagttgcattaaaatatttctcattatagctaagatataacagtaaacacaattgaatagaaacaatttttactcattttttaatgtagtctaggtatgcagctctctaatggttggactctgatgaaggtaaactccatgtatcaagagcacggagttttcctcagacaattctccttaaatgtcatgtcacttcaccaagatagataagaattggacagcagagaattaaaggttgcaatctttgacaaaatcctagagtgtagttaatctacagacaaaggatgatccaaaggctttgacaatcaaccaaatagaagataggattaaggttctcttttgcagattaaagagcctaactaggactcctgtgtgttttatgcacctgacaaggtctattctgttcatttaaaatagccaaaggacaaaagcagttttttttctccatgcctctttcccttcttccatttctgatcccttttatgtgctctcagcaagtgtagacataccttattaaaagttcaggatctggctatttgtctgtgcctctcaagcaagtagcttttcccccccaccaagggtcttactctgtcacccaggctggagtgcagtggtgtgatcatggctcactgcaacctccacttcctgggctcaggcgattctcgcacctcagcctctcaagtagctgggactacaggcacacgccccaacgcctggctaatttttgtatttttttgtagagatgaggtttcaccatgttgcccaggctggtcttgaactcctgagctcaagtgatccacctgcttcagcctcccaaagtgctggggttacaggtttgagccactgaacctagctgagaagatgacttcaaagacagtgtcctaaaaaatctaccgggcaggggaaggggatcatggtctagagatgagaagcagattcaaaatgagatgtggcccaagctgaaaagagaagggcaggggaaggaggacttgcttggagagagtgatactgtgaggaaaacgtcacttctcctaacctatcctctaaagtcagacttctctttccattttccaccttaatgtgtgagtgaaacactctctccaatgctcctgccaagtgatgaggggaggttactgctcagataaacagatctaattttcctactgtgtgtacacatgtatacacacacaccatccaaaaggtgaatatgcaaagctagtatcttatattatttgtcatgatcaaccttaaatcctagaataaatttgatttaactttgtagatcgtgttcaaaaatatggccagccgcccctatagcatttaccctcatggagtgaccttctcgccttatgaagatgaagtcaactcttctttcacctcaggtttgaatctttcacttctactgaatccaactagtaacttctgagaggctgccacatttttctgctattctccttgcccggtggtgtcactactgcagtcaggtagtatacatgtaggagtatcctaaaaatcacagccaaacccttctcacttcaggagttttgtctcttagtggtaacaaaatatggtgtcttttattagtgtcatagtggcctctagtggagcattatctaatggctacatgttatccaggttccaagtagaatatttaaagaattcaattgaacaatgagaacatttagacacaggatggggaacatcacacaccggggcctgtcggggggggggggtggggggcggggggagggatagcattaggagatatacctaatgttaatgacaagttaatgggtgcagcacaccaacatgacacatgtatacatatgtaacaaacctgcacgttgtgcacatgtaccctagaacttaaagtataatttaaaaaaaataaaaataaaagaattccttttgcaatattaattggttccagcgaaagcttatttatttatttattatcatgaaataactttgcaaatgaaaacaattttgaatatattttctttcaggcaggaacaacaccatgatcagagcagttcaaccaggggaaacctatacttataagtggaacatcttagagtttgatgaacccacagaaaatgatgcccagtgcttaacaagaccatactacagtgacgtggacatcatgagagacatcgcctctgggctaataggactacttctaatctgtaagagcagatccctggacaggcgaggaatacaggtattttgtccttgaagtaacctttcagaaattctgagaatttcttctggctagaacatgttaggtctcctggctaaataatggggcatttccttcaagagaacagtaattgtcaagtagtcctttttagcaccagtgtgataacatttattcttttttttttttgtcttgtctatttttatcagtaccatcactgccgaaggcaagtctagagtgtgataacatattttgtcttagtttcaaattccaggtctgttggtatcggatgtgttgagcaagttgattagcctttcctaatttcttccttttatcaaatgggtaataaccctcctaaaaatgttacaggtctgtttgggggttcagtgagataccatctggtaaaagtataaagctctttaccagtctttgctatttttagagacctgcaatagggagacagaggagagattctctgaaagcaaccaaatttagagacatagttcctagtgaaattggacccagattatggcccatctctgttgagactaaagtatacagaagaatgtgaacaaagatactgaatttctgagtttgtcttcattgaagaattgtagtctcatattattaaactaaaattcccaattatgctaaactgtaaccaaagaggtcttatctcaaggcatacaaaataaacatatgcctagaaaaagcagaaatgaatttctggacatatggaagatcctgatttattgagctaggaaaggaaacaggtagtagaagcataaggcttttctattgcaaccttctctttcatcctttgcacttattcagagcatattcagtcaatcattcatgttgaaaggtgtgcaattacagagatagacagactttcagctgccatagcgaaatgagatttttcttttgggatttgttttttttttttttttcttttgagacagagtctcactctgtcacccaggctggagagcagtggcaccattttagatcactgcaacctctgcctcctgggttcaagtgattctcctgcctcagtctcttgagtagctgggattacaggcgcccgccaccacccccatgtaatttttgtattttttagtagagacagggtttcaccatgttggctaggctggtctcgaactcctgacctaaggtgttccacctgcctcagcctcccaaagtgctggtattacaggtgtgagccactgtgcccggctcttttgggatattttaatctctgaattttcttatctgttctgtttgcttttgcatattacctttagctctaacaagtgctgtgtacacaatggactctcataaatgcctgaattatatggcttcagtagttccaagaactatgtcactttggtttctgagaactcagtggtgtagataatttgctgcaatgttaatgactgaatacagcacttttttttcttttttttttactcttaagttcaggggtacttatgtgcaggatgtgcaggtttgttacataggtaaacatgtgtcatggaggtctgttgtacttactacttcatcacccaggtattaagcctagtatccattagttattttttctgatcctctccctctttccaccctccatcctctgataggccccagtatgtattgttcccttctatgtgtccatgtgttctcataatttagctttcacttgtaagtgaaaacatgcagtatgtggttttctgttcttgcgttaacttgcttagaataatggcctccagctccatccatgtccctgcaaaggacataatcttgttctttttgatggtcacatagtattctatggtgtatatgtaccatattttcttcatccagtctgtcattgatgggcatttgggttgatttcatgtctttgctattgtgaagagtgcgaaaatgaacatacgcatgcatgtgtctttataacagaatgatttatattcctttgggtacataccaagtaatggaattgctgggttcaaaggtatttctgactttaggtctttgaggactcaccatggtatcttccacaatggttgaactaatttacactcccaccaagagtgtataagtgttcctttttctccacaaccttgccaacatctgttagtttttgactttttaataatagccattcttattggtgcgagatggtatctcattgtggttttgatttgcatttctctaatgatcagtgatgttgagcgtttttttcatatgctctttggccacatgtgtgtcttcttttgaaaagtgtctgttcctgtccttggcctactttttaatggggctgtttgtttttttcttgtaaatttaagttccttataaatgctccatattagacctttgccagatgcatagtttgcaaaaattttctcccattctgaatgttgtctgtttactctcttgatagtttcttttgctgtgcaggagctctttatttcaattaaatcccatttgacaatttttgcttttgttgctattgcttttggcatgttcgtcatgaaagctttgcccatccctatgtcccaaataatattgcctaggttgtcttccagggtttttgtagtttggggttttacgtttaagtgtgttgttgttgttttttgtttgtttgtttctgttatttttgagatggagtctcgttctgttgcccaggctggagtgcagtggtacgatctcagctcactgcaacctctgcctcccatgttcaggtgattctcctgcctcggcccctcggcctcccgagtagctgggattacaggcataagccacgatgcctggctaattttcttttcttttcttttcttttcttttttttttttttttagtagagacgggttttgccatgttgaccagactggtcttcaactcctgacctcaggtgatccacccgccttggcctcccaaagtgctggtattacaggcgtgagccaccgcgccaggcctacatttaagtctttaatccatcttgagttaatttttgtatatgatgtaagaaaggggtccagtttcaattttctgcctacggctagccagttttcccagaaccatttatggaatagagaatcctttccctattgcttgcttttgtcacagatcagatagttgtaggtgcgcagccttatttctgagttctctattctgttccattggtctatgcgtctgttcttgtaccagtactatactgttttgtcctccagagggcagcagacatcgaacagcaggctgtgtttgctgtgtttgatgagaacaaaagctggtaccttgaggacaacatcaacaagttttgtgaaaatcctgatgaggtgaaacgtgatgaccccaagttttatgaatcaaacatcatgagcagtaagtcagagtactatttttgttcatcagtttttcattcctgtggttgaaatatgactgtgcctagagtcagagacatggattaaaatctactcgctaaggggcacctccaatcctcacttccagtccaaagacttggtgatgaaatccgtgggtgacatcatagcaacatttttaagcaagaggtcaaaggctcacatccttagaaatgcgtttgatcttctattccaagcgtgtgtgtgtgtgtgtgtgtgtgtgtgtacacagacatactctgcgtggtgaggaaaagggtgagagagtaggactaatggaaggtgttatagtccatgtcaatagtatcctagactgagttcagggtgaatatatggctaggacagaaagaaggcaagtaatccaaagatggattgacacatcaaagtagagcaaaatgagtatagggacccaagagtcttggaaaggcatgcatgaagacatttcaagtgatcagtaagattttcagaacaaaaggaattccctgaatgagggttccggcatttgctgcagttctaaagttcagtggccaaaagcactgccatggcagtctgagagaaatgtcactgagccagctggaagcaaacttctccacaacagccagggtccccctactgatcctcagagtctagagtcatggtaatcaccttctctagtaggtaatcacacatgtgaggatgatttctgcatgttctgttcatatagcttcagatgactgacagctagggattatcagagctgacaggtgccaggtcaaataattcaaacagaaaattactctcagctttctttgcataacttccttttggcagtgaatctatcatagttctagaccagtgctgtccaatagaaactacgtatgagctacatgcgtaatttaaaattttctgatagcaacattaaaaagtaaagagaaataggtgacattaattttagtaatatgttttacttaactcagtatatcctgaatattatcatttcaacatgtaaccaatataaaaattaatgagacttactttattactaagtctttgaaattcaatgtatattttatactcacagcatatctcagtccagtctacccatatttcaagtgctcgataaccacttgtagccagtggctaccatattgaacaatgcagttatagaccatttagaaaaacatctagaatgaggtataaactaataatacatcatgtaaattattaaagtcacttaagtgatttaagtaggtatttaaatatttgttaatgccagtcattatactggtactaaggctaagagtggtaatcgaggtagacatgagccctgcccttgtagaaatcatacctttggttttttactatgcttagtacataagtaaataaaaatattgcctacagcagtgtcccttttaacaataatgaaatgtatgaactggatactcaaatggaaactgtgaatactatgtagattataagacagcaataaaaactataaaatatgctaaatgggctttatttttagggacattacttcttacccaatgactaatatatcaaaaagatgaatttcttatattatgcttttcctccaagtggaattattagaatatctttaaaggcagagaatggagcacaaaatatttactatacatttgacgaatgactaaatcaatgtaaatggaaggctttatctttttcctgagatttctcctttggctaatttaggagaataatctctcatttgaaaattctgagtttgatcttctagtcacatgttagactagataaagcttatcttggataatcactgctttgacacaaccaaattaacatggagacatttatcttaggtataattagacacatgcccttttgttggcatagacttggaattttaacagattttacactttcagctatcaatggctatgtgcctgagagcataactactcttggattctgctttgatgacactgtccagtggcacttctgtagtgtggggacccagaatgaaattttgaccatccacttcactgggcactcattcatctatggaaagaggcatgaggacaccttgaccctcttccccatgcgtggagaatctgtgacggtcacaatggataatgttggtgagtaagagtctggacactcacagaggaagcttgctttgaatttctggtctataaaggtctgctgcaactctccaggctaccagtgctcctctatgtatctccctgaccccctgcaggcttttctttcaatgtttctcatgatttctctttgagaaattaatgacttaaatggatccagttctttagtgtgggttatatttttccttctctgggcaaagtaggaagtaaaaatatacaacagcagaaaaataaggcataactctgaggaagaagcataaatattttggccacaaaagagcatttcttttatcaaaatgccctattcggttttttgcaacagtcatcttcaatcatcaggtacagtgccttaaaggctgcttcagcaacagctttggagtttgtcagactggaatgcaagtcctgatctgccaatcgattgctgtgtaaccttacacaagttacttggccacactgagccacaagtcatttatctggaaaacagtgtaatcacatctcacagagttactttgaccattaaaatagtaatatgcgccaagtgcctagcactcagtagacaccaacaatggtaactattggagactcaccaagaaatctttgatgttccagcaatgcatgccatttcagagattcaaaattgtcctcgtgaattattacttagaaacatctaaatgtctcttatttgtggggatagagctcatcaccatccctttaattctaagacaagatgtgctgttaggatatttatgatattaaaagtccattttattcttgattcatccctttcttaatatattttaaaatagtgagcaactatctgtgctgaaagaccttttttcccctctaatctccactaagcaacacttttgttttttattctgttaagcgagatgaacgcactggtcatgtgcttagagtcacagcaatgtcaaattgctttagaaaaacaaaagtttactaaatatttcattctcatttttctctccttgtgttattttgacccagtaatcaataggtcacagacaagcagtggtccacagcccatacttgaatattcctgacgaaagtttattagaaattacctgccacaatggattattgtgttttcatgtcttttcccagacttccagatctctcttctgtctgtctctcttctgtaggaacttggatgttaacttccatgaattctagtccaagaagcaaaaagctgaggctgaaattcagggatgttaaatgtatcccagatgatgatgaagactcatatgagatttttgaacctccagaatctacagtcatggctacacggaaaatgcatgatcgtttagaacctgaagatgaagagagtgatgctgactatgattaccagaacagactggctgcagcattaggaatcaggtcattccgaaactcatcattgaatcaggaagaagaagagttcaatcttactgccctagctctggagaatggcactgaattcgtttcttcaaacacagatataattgttggttcaaattattcttccccaagtaatattagtaagttcactgtcaataaccttgcagaacctcagaaagccccttctcaccaacaagccaccacagctggttccccactgagacacctcattggcaagaactcagttctcaattcttccacagcagagcattccagcccatattctgaagaccctatagaggatcctctacagccagatgtcacagggatacgtctactttcacttggtgctggagaattcaaaagtcaagaacatgctaagcataagggacccaaggtagaaagagatcaagcagcaaagcacaggttctcctggatgaaattactagcacataaagttgggagacacctaagccaagacactggttctccttccggaatgaggccctgggaggaccttcctagccaagacactggttctccttccagaatgaggccctggaaggaccctcctagtgatctgttactcttaaaacaaagtaactcatctaagattttggttgggagatggcatttggcttctgagaaaggtagctatgaaataatccaagatactgatgaagacacagctgttaacaattggctgatcagcccccagaatgcctcacgtgcttggggagaaagcacccctcttgccaacaagcctggaaagcagagtggccacccaaagtttcctagagttagacataaatctctacaagtaagacaggatggaggaaagagtagactgaagaaaagccagtttctcattaagacacgaaaaaagaaaaaagagaagcacacacaccatgctcctttatctccgaggacctttcaccctctaagaagtgaagcctacaacacattttcagaaagaagacttaagcattcgttggtgcttcataaatccaatgaaacatctcttcccacagacctcaatcagacattgccctctatggattttggctggatagcctcacttcctgaccataatcagaattcctcaaatgacactggtcaggcaagctgtcctccaggtctttatcagacagtgcccccagaggaacactatcaaacattccccattcaagaccctgatcaaatgcactctacttcagaccccagtcacagatcctcttctccagagctcagtgaaatgcttgagtatgaccgaagtcacaagtccttccccacagatataagtcaaatgtccccttcctcagaacatgaagtctggcagacagtcatctctccagacctcagccaggtgaccctctctccagaactcagccagacaaacctctctccagacctcagccacacgactctctctccagaactcattcagagaaacctttccccagccctcggtcagatgcccatttctccagacctcagccatacaaccctttctccagacctcagccatacaaccctttctttagacctcagccagacaaacctctctccagaactcagtcagacaaacctttctccagccctcggtcagatgcccctttctccagacctcagccatacaaccctttctctagacttcagccagacaaacctctctccagaactcagccatatgactctctctccagaactcagtcagacaaacctttccccagccctcggtcagatgcccatttctccagacctcagccatacaaccctttctctagacttcagccagacaaacctctctccagaactcagtcaaacaaacctttccccagccctcggtcagatgcccctttctccagaccccagccatacaactctttctctagacctcagccagacaaacctctctccagaactcagtcagacaaacctttccccagacctcagtgagatgcccctctttgcagatctcagtcaaattccccttaccccagacctcgaccagatgacactttctccagaccttggtgagacagatctttccccaaactttggtcagatgtccctttccccagacctcagccaggtgactctctctccagacatcagtgacaccacccttctcccggatctcagccagatatcacctcctccagaccttgatcagatattctacccttctgaatctagtcagtcattgcttcttcaagaatttaatgagtcttttccttatccagaccttggtcagatgccatctccttcatctcctactctcaatgatacttttctatcaaaggaatttaatccactggttatagtgggcctcagtaaagatggtacagattacattgagatcattccaaaggaagaggtccagagcagtgaagatgactatgctgaaattgattatgtgccctatgatgacccctacaaaactgatgttaggacaaacatcaactcctccagagatcctgacaacattgcagcatggtacctccgcagcaacaatggaaacagaagaaattattacattgctgctgaagaaatatcctgggattattcagaatttgtacaaaggtttggccagttttctccttttttattctcatttttccattactgctgaaaaaagtagctactacaattcagggggataattgtgggcaaattatactaagaacagtgtggttcccctattgcaagttggcctgttctttttcctttgtcaattccaagattgcttctttaccttagatgacccctggacaatataagaacaatcactgtgagaactctataatattctgtaattaagcatttttctgtgtcctctcctcttactacccatgtttctactgactcttattgctccaggcagagcccaacctatccatagctatatgctaatcaatatgatttaattgaagttagcctcaaatccaaactcaaatatgatgtagaaatctcctttttgcatttacttgtttagatcagaatttctaagagatccaaatcccttttttaaaagaatatttacaattcagttttgcttaggggtagaaagccatgttgaactgggctctttgttctgggatgaagatacagaaagagaagagagaggaggaaaggagcaaggcttagtcaactacaaattctcagggatatagcatgatgactgtgcatcagctgtctagatatgcccacagcttttactaaagctgttacactaatcacttaaaaaaccaaagtgtaattacagtaggcaaacacaatgtatggtgtgacttatgcatatgagttcattaatctgatgcctgacatctccacattagaactctgtttaaaacaccttttcctatgacttcctatttaaatgttgcactcaataccacatgagaacaactagctacctgagtatttctaagcaaggccccgagggagtgagatgcagggcctgtccagagtgaatagggatggaaccaccttcaaaatcttgtattccattcaaggctcacaacccacttttatggcattcggagttgctttacccactcccttgtgttctgtgagtttgcatgttatgctcagagtctggaaagatgggattagtaggggaggtagaccagaagaaaggcagaaggagattctctgttgatgactcacagtatatagcaaatattatgggtttgatgggtgagtgtttggcttgtttccacaggcttgggaaatgtgagagtcagtgggagaattcgacatgcttcagtcctagactgagccaatgaactagatggaaataatgtgctttatttatttatttataatttgtaattaaactttttattttggaacaaaaataaaatagattcacatacagtcaagagaaataatacggagagatcctttgggtatcctgagtattctttacccagtttctcccaggggtaacattttgcaaatctataatactatatcacaaccagcacactgatgttgatactgtcaagacacagaatgttcaccatcaccataaaaatccctctcattacccctttatagtcacatctgccttcctcccaccatagcccttccttattccctggcaaccagtagtctgatctccatttctataattttgtcatttcaagaatattacataaatggaatcaggcaacatgtaacctttggggactggtattttttcactcagtataattctctggagattcatctggttattgcatgtattccattatatgggtgtaccccagtttttttgttgttgttgttttatacacatttatggtgtaaacatgatgttttaatatatttataaattgtgaattggctaaatcaagctaattaacctatgcattacctcacatacttttttgtggttagaacacttaaaatgtactcagcaatgttaaaaattcagtgtgttgttattaactacagtcaccatcttatacaacagatcttctaaatttatttcttctaactgaattttatcttttgaccattttctcaatgctccacctctgtatccctttgttaaccactgttctaccttctgcttctatgagctcaatgtttttagtttccacattataagtgagatcctgcagtacttgtctttctgtgcctggcttattttatgtaacataacgacctcctggttcagtcatgttgtcacaaatggcatttcttcgttttcttttttttaaatgctaaatagtatttcattgtttatgtagatcacatttaagaaatccattcatttgtttatagacatttgggttgcttccctatcttggctaatgtggctaatgctgcagtgaacgtgggacagcagatatctcttcaacatactgatttcattttctttgggtatatacccaaaagtgggattgatggatcatgtggtaattctatttttaatttttaaaggaacctcccatactgttttccataatggctgtactaatttacactctcaccaagagtatacaagagttcccttttcttcacatccatgccaacatttatctcttgtcatttttataatagccatcctaacggtgtgaggtgagccctcattgtgattttaaattgcatttctctgattattagtaatgttgagcatcttttcatatatttgttggtcatttgtatgtcttcttttacgaaatgtctattcaagtcttttgctcattttttaatcaggctatttgggttttttgctgaattgagttccttatatttttaatattaatattcttatcagatatctggttttcaagaatattctcccattccaaaggttgtctcttcactctgttatttcctttgctgtgcataaacttttgagtttgatggcaatcccatttgtctatttctgcttttgttgcctgtactttcgaggtcaaatccaaaaaatctttgtccacaccaatgtcaagaagcttaagaataatggacattagcaaaaaacaaatgtgagaagagtggctacttttagggtacaaaacattcacccatccagtgactttcataagtgtgaccttctaattaatctgaccattgtcacctgatagccccaagctctggcactgtcccattacatggctttgtctgcctttgatcttaaaatttggtgtgttaacatacgattatatttatacattcatttatatgtttgacaaaaatttattaagttcctgctgtgtgtcagataatgtgcttaccactggagagagtactatgagcaaactaggcacaatggctgacctcatggcacttatacccagtgagagacagatattaatagataatctcacaaataaattatatataatctacaatatatattctagagatattataagaatactacaggaatttactatatatactataataatactatagaaatatgagaaattgatatagagacttgacctagtctaaaaggtcataggaagacttacctataaaataatatttgagttaggaattgaaagatatttactggcttttgtttttatccacttatatatttactcatttatccaccaagtatttattaaagaccttctctatgctagatgctatatttagaaagagacaatttcctaaattctgggaacagtctttaatttcttcttttacacaaatagtattattatttcagggaaacagatattgaagactctgatgatattccagaagataccacatataagaaagtagtttttcgaaagtacctcgacagcacttttaccaaacgtgatcctcgaggggagtatgaagagcatctcggaattcttggtcctattatcagagctgaagtggatgatgttatccaagtaagtcttttgagcactgctaagatcttcggaggaatttccacaagcaccagagggttgtaaaggtgcaggtggcaagagagctataggtgatttgtttgttttccaggattaatgaataattacatttcttttcaaagactccttgccaagcaatttggcaatcttcgaactaaaaaaaaaaaagatctcattttttaaatgctgaaaactatataatctgtggaaaatctttctgtaatttctatctaaagctaacctatctaaagttaacacagaaaattaatatattcaagagcaattgaattgggtttcatagcagtggtggtggtggtggcagtagcagtgctagtagtaatagtaatttagaaatatcttcaggtgttttcctaaaaattaaataaaatgaagttaaataaaatgagtaaggaaagtaaagatgtctccatgccctccaaaagtgagcaagtttcttcagtgtcttcctagttctggtaatttctttcaaaatcttgtgtccagacccacgattataacttgcttttataacaaagtttacttccgccatttttgctaaccgctcacattcaaaaacccagaaagaaccctgattctaaagtaagctattctagattttaaaatataatctactatacctgtgtaagcattcactacattttcagtgaccatttgctctttttaaaaacgtaaacaagtacatagggatataagaatcttaattattctaaattttccatgaagctatgggaggcaatattctcttttatgattaggggatcctttttcaagatgaacgataatttaacacaatatttaaaaaacttattctaagtaactcaggaatcaaaaaccagacactgtatgttctcacttacaaatgggagataaactgcgggtatgcgaaggcagacagattggtataatggacattggagactcaaaagggaacgggggatggatgaaaagctacctattgggtacagggtacactactcaggtgacaggtacactaaaatcctagacttcaccactatacaattcatccatgtaaccaaaaaccacttgcattcctaaagcaactgaagttttttaaaaaatttaaaaatcaaaattaatgcacgaaagccacaataaacaaaacctcacaattgtgaataaagacaggataagtaacaatgttgcattgagacatactggagccttaggcaaaaggaaaaaaatcaaatactgaatctttgttttagccctggatttcactagataaaaatgacttcatttgtgtatttttaaaataattttaacttttattttagattcagggggcatatgtgcagttttgttatctgggtatattatgtgatgctgttgtttagggtatgattgatcccatcatccaagtagcgtgcatagtacccaatagtttttcatcccttgctcatctccttccttcccccttctagaagtccccagtgtttattgccatctttatgttcatgagtacccaatgtttagctcccacttataagtgagaacatgtggtatttggctttctgtttctgcattaattcacttagcataatagcctccagctggcatccatgttgttgcaaaggacgtgatttcagtctttgttatggctgcgtagtattccatggtgcatatgtaccatattttctttatgtagtccaccactgatgggcacctagattgattccatgtctttgctactgtgaataatgctgtgatgaacatcctagtacatgtgtcttttcagtagaacaatgtattttctgtctttctttcttttttttttttttgagatggagtctcactctgtcgcccaggctggagtacagaggtatgatctcaactcactgcaacctctgcctcccaggttcaagcaattctcctgcctcagcctcccgagtagctgggattacaggcacccaccaccatgcccagctaatttttgtatttttagtagagacagggttttaccatgttggccaggctggtctcaaactcctgacctcgggcaatctgcctgcctcagcttcccaaagtgctgggattacaggcatgagccattgcgcccggctgaacaatttattttcttttttggctatatacccagtaatagaattgctaggtcaaattgtagcaggacaagccacagacaaaaacccctcagacaccaagttaaagaaggaagggctttattcagccgggagctttggcaagactcatgtctccaacaaccgagctccccgagtgagcaattcctgtcccttttaagggctcacaactctaagagggtccacgtgagtgggtcgtgattgattgagcaaggagggggtacgtgactgggggctgcatgcaccagtaattagaacagaacagaacaggacagggattttcacagtgcttttctatacaatgtctgtaatctatagataacataaccgattaggtcacgggtcgatctttaactaccaggtccagggtgtggcgccgggctgtctgcttgtggatttcatttctgccttttagtttttacttcttctttctttggaggcagaaattgggcataagacaatatgaggggtggtctcctcccttaaaatagtagttctgtttcaaattctttgagaaacccccaaacttctttccacagtggctaatttacattctaagcagcagtgtataagcattcccttttcttcacagcctcaccagcatctattttttgactttgtactaatagccattctgactggtgtgagatggtatttcactgtggtattgatttgcatttctctgatgattagtgatgttgagcatttttttcacatttgttggctatttgtatgtcttcttttgataagtatctgttcatgtcttttgcccactttttaatggggttatttgtatttcgcttgttcaattgtttaactatcttatagtttctggatattagacctttgtcagatacatactttgtgaatattttttctattctgtgtctgttcactctgtagatagcttcttttgctgagcagaagctctttagtttaatttgtcaatttttgcttttgttgaaatgcttttgaggaattagtcataaattctttcccaaggctgatatccagaatggtgtttcctaggtttttcttctaggattcttatagtttgaggtctgacatttaaatctttaatccattttgagttaatttttgtatatgatgaatccagtttcattggattcattggggttcagtttcattcttccacatatgggtagccggctattccagcaccatttattaaatatgagtccttttccccttgttttttgttgttgttgttgctgttgttgttgactttgtcaaagttcaggtggttgtaagtgtgtggctttatttctgggttctttattctgtttcattggcctatgtgtctgtttttgtatcagtaccatgctattttggttattgtaactttatagtatagtttcaagtcaggtactgtgatacctccagatttgttctttttgcttaggattgctttggctattcaggctcttttttgattccatatgaattttagaatagctttgtctaatcctgaggaaaatgattccagtagttgttaaaaaatagtgttgaatctgtagattgctttgggcacaatggctattttaacaatactgattcttccaatacataagcatagaatgtttttccatttgtttgtgtcatctatgatttctttcatcagtgttttgtaattcttcttatagagatctttcacctctttggttagatgttttcctaggtattttgtatgtgtgtgtggctatgtttaatgggatttcgttcttgatttcgctctcagtttgaacattactgatgtatagaaatgctattttgtacatttgtacattttattttgtataattgattttgtacattaatcttgcatcctgaaactttactgaagtcatttatcagttcctggagccttttcatggagtctttagggttttctaggtacagaatcatattgccaatgaagagagatactttaacttcttttcttctttggttgccttttatttctttctcttgcttgattgctgtgactagaatttccagtactatgttgaataagagtgatgagattgggcatccatgtcttgttccagttctcacggggaaggctttcagcttttgctcattcagtatgatgttggctgtaggtttgtcatagatggctcctattagtttgaagtatgttccttcaatgcctagtttgttgagggtttttatcatgaagggatgttaggttttatcaaaagctttttccacatttattgagatgatgatactgtttttgtttttaatgcggtttatgtggtgaatcacatttattgatttgcatatgtggagccactttgcatcctaggaatgaagcctatgtgattgtgatgaattaatttttaatttgctgctggatttggtttgccaatattttgttgaagatttttgtgtctatgtacatcagagatattggccggtagttttcattattcattgtgtctttgccaggttttgttattagggtgatgctggctttgtagaataaaataaggaacagacaattagggagtctttaatcactagaagttatagaagggctgggaggagcttcatgggtctgactgctggggtgtgaagacttctcatatggcatttaagtcctttaccatctggccccaacctgctccttttctagcctcatttctcaccaggttccacctgtccctgtgcatttcacagcccagttccaccgagatccttgctattccccaaactcttcctttactcccctgctcacaggcatccttctgcccttctgagagtctgaaatgtctttctagctcctgttcattctatgatggccaattccatttcctctaagaaacttaccttaattcttccaaccactcctaaatattcaaccaaattgttcctccagggcattgtcatctgaacccacttagactttgtatatagcacctgttgtctccagatttgtagtgtggatgcccatgtgcatgtctgtttcagcagtagcttaaaagcttcttatgaacaagaatcaagcttctttcatcttcacatctccactacctatcactctcatttcattagtagataatgtcagtactttagccttgagcctaagaacaaatatcttttggtatttctggagaaaactacttgggccatatctcacaggatggttatgaaaattaaatgaaataatatacataagttattttgtaccttatatcttagctccgattttataaccagccattttgacttataatgctgacatttttgtggtttagatttttgttaagcttaagtacatttgtggatcattccttttcctaggttcgttttaaaaatttagcatccagaccgtattctctacatgcccatggactttcctatgaaaaatcatcagagggaaagacttatgaagatgactctcctgaatggtttaaggaagataatgctgttcagccaaatagcagttatacctacgtatggcatgccactgagcgatcagggccagaaagtcctggctctgcctgtcgggcttgggcctactactcagctgtgaacccagtaggtactttcattgaaagtttttctcattcccctaacctcgtaatctgaagtccaccaaatggaagagtcggggttatttcttgtcaaatgtctgtcttgcttttcatgaggaatgcataagggtgtggttaacagtctgcatttatcataaccagggactctccatgcagctcttcagatgacagagagagaaacatttattcagtggagaggaggaaagattacttgaatgattggccatgaattagaatgcctacatttacagaagatggcatttatttgaaattttcttgaacaagtattagctatgttctgctctttctttatgaaaagaactgcaaagtcaagactcctttatctgacattctgcaatgtatatatacttcaaaacaatatgtcatacacagtatatgcatacaattttatctgtcaattaaaaagagaaacaactcctccatttcaggcatagtggaaagagcacagactcagatttaaatttttaccctgtcaatgcataatcctaggaaattccttgacctctcttagcctggtatcagaagttaaaaatgagataacagtacatagtgcatggtaagcacttggtaaatatttgttcaatgaatgaatttatatttaccatataagatagttgtcaggattaaatgggagattgcaggcaaatcatttaatatagtaatagattctcaataaatagtatcccttatattatcaatttattattatcatcattgttactgggataaagatcaatcagaggaaggaggattatgaatacaacagaattaggtgataaatatccaggcttattatgccattcatttataatcttcatcttcaaattcagagcctatcagaaagtttccttttctatatgatgagtgattatcagaagagcaaggaaattcctgagaaagaggcaatacaatttactctgtttttccaggaaaaagatattcactcaggcttgataggtcccctcctaatctgccaaaaaggaatactacataaggacagcaacatgcctatggacatgagagaatttgtcttactatttatgacctttgatgaaaagaagagctggtactatgaaaagaagtcccgaagttcttggagactcacatcctcagaaatgaaaaaatcccatgagtttcacggtattttcctcggactttgatctaatctcctaattaaatcacactgggtcacagtgatttctgcccttagatattcacaagattagacatgagatgcttctgagacacccagagctacaactaaaaccggttccttaacattccagagggctgatgtaatctggcaggtgacactgtgggtgaggcaaaaagagaaagtctgaaagatagcacagagaagctgctgcaaaacaaaccaacagaaaaccacaacaacaaaaagccagtgtgcttcagctggtaacatacattgaaaaggaattaacattgttctgcaatttaaagttaataagcttgtttctggatctctaaaggcacaagtgtttatataaaagaaatgatcacctgtgtgtcttttctaaaataagaatgacgctaacagttttagctctcagcagctaccaggtggcacccaaagcatatgagaacaaaatgagataagaaactaggtacccaggtaataggagaatagtggcaagagagcatttgggtggtcacactgggaaaagtgtgcctatttggaaattcacaaggaaaatttgccctgtaagctagtaactgaaacagaaactgagaagagaaaggtacgagcttgtgttatgaatatgtagataggtgttctcacgcctgatataatttgaaggatgcccaaatgatctcaacccgtccctctccaaaaattcacctgcctggtttctgaaatttcacagcagttcctctaacttaagaaggaggaaacaaagcacttccctcactttggtttcagttaaacgtttggtaacactaaactttatctttacagttttgtgttacatttttaaggtgatcaagtttctcaggaactttttaaaaaatccgcgtattttactgtggggagagtagataaagcctgagaaccctagttatctaatctgagaagtgggcagaggagttgtcataccaataagagaataaacatgacttgctatggttgctggatacaccaacgataaactcctaattttataaactcctagacttcctaatttgcctgaaactttctctgaatttagaaggccttaaggtgacatgctgcatatctccttgctgactctaatccctggagtttactttgtctgcccatatttgtatttatcttttgtagttaaggaaaattaagactgttaatggaaagtatacacgggtaaagcacggaactgtaaaagctgaggaaaagagtgataaactgcttggaaagggagttccccctgccttctgctgtaggctggtgtgaatgatatgagaaggactagtggttctgctttagcctctcactaatgtgacatacaagagggccctttccatggctaggtaggcctgggaatgcagaatcatgaggaacatgggtgttgagtgggttgccccatatttccttaccactcgccctctctgtgtcaacagatttttaattgatttcaactctttgtcctttcagccattaatgggatgatctacagcttgcctggcctgaaaatgtatgagcaagagtgggtgaggttacacctgctgaacataggcggctcccaagacattcacgtggttcactttcacggccagaccttgctggaaaatggcaataaacagcaccagttaggggtctggccccttctgcctggtaaagattgggtaatgggaagaggtccctgctaagaaatacagggaaaaggcaatctgtaactccttctcatttcttccttgtgcatatacttcctaaggggtcagaacacagggttctggcatagagcctaggcaaacccatagacccaaagtatatacggagtacaaaaatgtcacctaatttatgaactatttgcagcaccacacaggctaaatgtgtgacccaactcagttgcaacataacatgcagtttctcccaagccactgtgtgtcatacagatgaggtcttaagcagatgaaaaaatgaatcccacagggctcaggcagctacagctatctctgctgggagggtttccagattcttcagttctgctcctcttctaggccctatcaccctaatatctttgggcaagtgactccaggaatcacattcttaaactgacttatagactgtttgaagaggaaaacatttttaaaaaataataataaaagttaaagaataacaaaggtatttagaacttttcatgtgcaaaataaagataaatgtagatttaaacagtctacaattatacagaagggatgtttctgtgccaatgagttgtttgtaagtgtatctacttgtgcagcagtataaaaacctaggaagtcagttaaaatgcagatgtgaaggcagagggattttgttctcagagactttaaagtagattttgggcagaattccaaggagtctgtatttttaacaagcagccttccttctattttgccttctattaaaagtaatggcaaaaaccgcaattatagtttgcaccaacctaacacatgctgcctgaggagttagtgaaggcagcccctcgacagcactttgggtgacgttgtgtgaatctgcctcagatgcagacacagaagtccaaatggactggtttgattaagagcagggaaaaaaagagggttcttattggtttttcacatgccagtaactcactaatacatctagagagtattaattgtattatattaatatcatattaattaattaatataataattaatagataatttattgtattaaaatcagagacagaagagattcagtcaaatttactcatcttttcatcaagtattagaagatcagtcatccttcctatcagcctgcagacagactgagaagctaggattggctggtgtctctaaatctgcaaacctaaatacctgcattggagagaggaaaactggagacatttttcagtgtgtttgaggaagataatcatatctattcattttcacccacaatctgggaaacagtcataaattatagtcaacagaatttaaatattaactgccagggggtaatgttaaataccagaatggatagccagaggttttagaaatctcattctttcagtgttttttctgagcaatttatgtaaatctctattcaaatatgtaagctttatggaaaacttgaaaacatggaggaagaaggttttatttttattttcttatataaaaaagagaaaaaagcaaaaatgaaaagagggaaaggaaacatgtatgatatttttgaagcccaatgatgtcattcgaggtcactttgataattaggactgtgaagctgtattgtatgtgagttaatttgtaacattatatttagataagtgaaagtttcttctagtgaggtgtggtggtgatttaaaattttttttagttatctctgtgtatgtgttgttattgttttgtttttatctgttatactttcagtcctacctaaagaaaaatggttaaattctatttgaaagcctcttgtgaagcaggaattttaggattcttagagaactatcaaccacaatatttacttgttaatttttgcaaatgtaatgttgttctttttattttaggttcatttaaaactcttgaaatgaaggcatcaaaacctggctggtggctcctaaacacagaggttggagaaaaccagagagcagggatgcaaacgccatttcttatcatggacagaggtatcacaagagccatgtgatatttggtttggcaggagagtgcctattactagaatattaccaacttttagattggaaatattcaactctaagaactctgatgtgacaaaggcataatttgtagccataattgcttttattccggcccatggtctgattgcattgaaaacacatcagtcagatcaaaagcattcctgtcaattgggaaacctgtgtaaagcatccttcttcatgacttgtgatccatggacaagtgcatataagaaattttccagcttccaagagttgaggagggaaaaggtcacaggaatttaacaatgactgagtcactaaacttgacatttcagcatttaggaaacacagttttcatctgtccatctgttcatccattctttaagccattactaagcactgttgagtatgaagcactgtgccaacatccaggtagcacagtggctggtatcccttccttgatcaagatataaataaccttgtaactttgaggtcaacttttgagaacatagtctcatcaggactagaactttttttcatatttttatattttgtatttttattttttttgtagagaagaggttgcccaagatcaaactcctggcctcaagtaatcctcccccctcggcctcccagagtgctaggattacaggcatgagccactgcacctggccatggatggtacctaatgttgtaaaatagcataatttaagataaaagcagaagaaaatcagtttaaaaaatgattacatttcaggatttcagttgctttcttctaggatgccactatatctattaaagcaccagtcttgttagtgcatttaccattttataatcagatatatttaagtcagggccacacaaggtaggtaaaaatatctaattattgagtcagaaacataatccctaaccatggagttttactttattgtatatattttctaagcaaaaattattcattttttttctgtttttcatagactgtaggatgccaatgggactaagcactggtatcatatctgattcacagatcaaggcttcagagtttctgggtaagttgtagcaccatggtctgtgaatggtaccccctacagttgtgcagcatgcagcctatgaaaccatacatgacaatcctatctatgaatcagtttttctctttatgcttttctctacgacaatgtagtgaagcagctccatttggggtacatatatggtaaaggaaggaacactatggtaggagctaaaggcctgttagtgtgctcttaacactgccacctcttctggtgtataatgatcccaaagagtcttttccaggaaaaaccgatagctgggggtcattgatttctctacataaaaagcccagcctctctgcagggatttggcaaggatcagataccttagtcttatgaccacgcgcccatttccaaaactctcctcagtcatcttttctgggtttgaccacacatgtagtatttcagccagattcacagggtcttatcagccaggcattatagtccccattaatatggccctttgcctgtggcaaccattcatctattcagaaaactttgttgaacctccactatatgtgaggaactcctccaaagttttcccacactgcctcaaagcccttcccaagatcaagaggtcatgatcaagaggatgatgaggctcccatatacccttccatgtcttcctgttaggcaggcacattcagcattaggaatataaacacaacagaaaaaatcaaacatgacctgtgtgcaagaaaggggataggaggtggttggcagttgaccaaacacagacctgaagcccagatttcatcatcaaggactggcctagtagctgaggcccatgcctagactcctgactacaacacaggtcctccaaggatctggttttccactggattaaactcacttgagaaattgctgggtttttaaaaaattcagaataaatctttttcttcccttgagtttaggttactgggagcccagattagcaagattaaacaatggtggatcttataatgcttggagtgtagaaaaacttgcagcagaatttgcctctaaaccttggatccaggtttgtcttaatagactgataatatttactgctatcgtaataataaaaatgaaagtgatttagtaattccttgttattgttcttgcaatgttgttaggggaaatagcaagtactaagtgtgaggcactgttctaagtactttatatccttaaaatcaaccctctgaggttggttctaataatatcttgttttatagattaaaaaacaaaaggcacagagatactacctaccttcccaaagtaacacacagctaattagtcattgagttgggattcaaatttaggtactctgtgcccaaatatgaattgcatgtagtcattgtatcagtttgctaagatcttatgtgctagctctttagttctgaagaaagctgattgtataatgaatttaggcagtgtgtgacttgttgacaaggacagttctgtttactggctttcctatattgcaggtggacatgcaaaaggaagtcataatcacagggatccagacccaaggtgccaaacactacctgaagtcctgctataccacagagttctatgtagcttacagttccaaccagatcaactggcagatcttcaaagggaacagcacaaggaatgtgatggtttgtgtgcatatttctatctgaatctctagactctagacttggcctagaattattatgactatacctaatgattatgtattttaaaaaatacctttctgggtattagaaatgtgaatggctttctaagggtcatatggagaaaagcagtaatatgataggtctgtgtcttacaaattaaagagagaagcagggttactgaaacttcaaaaccccacaaaactttaaaaaatcattttatcatcaaacaaaatacccagatttctcagactggccaatggtatacggcagagtagaacatctggtcttgcgcctcaaggagctcatgctaaaaattggctaccaagacttttgattttactattgtagtttgttttgttctttatttcagtgtacctgaagtaaatagtagtgttaatgctagtaagcctctgaggcagtgtgattctcagactttttggggggccatgcctgaggaatgacattctccttctggttcttccaggggctcagccataagccctaactcttctcctcctctctattcccttccccaaagaagtctgaatgcaaggagtctgcctgccattattataccaataaccttgagtctgtttctgcttatattttatataaaattatttactgtttattagttacctatttttaataattatttatactatgtctcagaaccattgaaatcctaaattatggttcttactaatcagtattatgagagaaaacacagattgcagttgagtccatagcataaagattttgtcgtctatgttcatgagaggatattggtatatagttttatttttttaattgtctttttctgtttttgataccacagttatactagctttcataaaattggtaagcatgctcttttctacattctaggagaaaatgtctgcaattggtaataattctttaaatatttggtaggaatcactagtgaaaccatctgggcctgcagatttctttttgggcagtttttaaattacagatcctatgttctaaatagttacagggctattaaaattatctatgtcatattgggtgaattgaaatactttgtatatttcaattaactggtcaattccctctacgttgttaagtttatatgtgtagagttgtttgtatattcccttatcctttttcatgtttgtagtgattttgcctgtttcatctctgatattgtcatctgcccctcctttcttttttgtgtgaatcttgctagagatttgtcgattttaaaaaaatcttcttggccgggcgcagtggctcacgtctgtaatcccagcactttgggaggccgaggtgggcagatcacgaggtcaagagatcaagaccatcctgaccaacatggtgaaaccccctctctactaaaaatattaaaaaaaattaggcagggtggcgtgcacttgtaatcccagctacttgggaggctgaggcaggagtatcgcttgaatccggaaggcagaggttgcagtgagccgagatcacgccactgcactccagcctggtgacggagtgagactccgtctcaaaaacaaaaaaaaaaaaaaaatcttttcacagaaccagccttgttttattgatttttctctattgtttttctgttttcagtattaccgatacctgctccaatcttctgttttaaaaagttggctttttctgacattgctctgtcaggaaaaggggtagggcacagcctgtttactgccaagtgggggtcaaagtccaggttccccactccattgccacctaagaagggattgttccttggtggctgggtgggaagggaagttccccatttggcctccactgatactgcaggggcaggagcttcattaggggctggagatgaaagccctaaatccctacatggccttttctgacacaaccccagtgagggtgtagggtgcctctttagcctcaggagcatagaagtctaggctccccattcagcctttgctgttgtgggttggggaggggcctcaggtttttctgtggtgtttggctaaaggagagaagtcagtgtccaccagttttctatcatatctcgctatgctgccctttactggtactttggttagagaaagcagattttatttgggctttttcagtctgtactcattggtgtttccaggttgccggcttcttcatctctaagtctgggatttatgaggcaaaaagaaaattcaagacactgatcaccattttgttccttccgagaaccctagccagtctgtcttctgagctcttttcagggtcttatgtttctctgagctataatgtccaaagtttttagttgtacttagcaggaggaatagggcaaagtacatatatacaatcttcctggaactggaattatccccaagtatattttataaccaaattgatttagtttggaccccatgaaaatgtagtattacaatattaaattagatcaaaattttaatataaagtcactttatagatcattgttacataactaaactttcctcttttcttctagtattttaatggcaattcagatgcctctacaataaaagagaatcagtttgacccacctattgtggctagatatattaggatctctccaactcgagcctataacagacctacccttcgattggaactgcaaggttgtgaggtaaatggtaaggtacaaagatgcattattttctcactgccactcaaagaatcaagatttgggaggtataggagaatgagtagaatttttagttcttttcagtgacttaggctcctaggaaaacctttgtgaaacagaggttctactcaggtaaactctcagtgtgatctagaccaagaatggttctgccaatcagagtgccgacagcatctctgtgaagaaagtgcctggattatatagacacatcacaactctccaaggaagggctctaatttggaattacctccatcagcccattttcaataagacctacctgagattcaaactaggcctgactcttccaaagtcctcaggtcactcaaacttcaatgtcatgacagtatctggcaacatcactgccatatatatggtgttcaatgagtgtttttgaaatctgaattggcttcccaacttcctgaaaccacaattcttctttatattttctttcataccctgtgtaggtactcaagtcttttctatgttagctgctatttctcaggggctgtaatgtgacctgtggtataaataaatccaggtaatcataaatggtcataataaaattctactatatatagcaaggatgtttaagagtcttaactgttcttcttggactcttaaagcagtgctttccaatattttttacttcaaagcacacaaagaaaataatatctgcctggcattctgaggtaaaagaatgaagcaataaatctaaggcttggctgatccaggccccacttggctgctgaagggctggaggtgggaagagggatcaataaataggtgcactagaaacctgccatggcacacctgtcaggagttgcagtacttccctttgggtggagagaagccaccatgattcacaatggagaaagtagctgaaacctggaatcagtttcctgttgaagcagataatggcacagtatacccttggatggatatgggtattttgccaatgtccagatagcagtagtctaaaacatctcccaaataaaacacagatcttgtatcggcaggaccactccttgaaacagttccataagtcattgcgtttttttctttccatatggtataaatagatttgttcagatcctaataaactaccctaaaatgtgacattcaattctgctaacttatttaaaacatctattttttatacaagaagcattattttcttcttattcattttcttgatacttaggtaattattagcagtgggtattatttttaggaccctttgtttttttcatggagaaagtaaggcatcacttcaagaaaatttctgcatgatttaccaacaagaacaaagtgtcacagagatgatgggtggtcagccaggttcactcactagctgtgtttcttacagtcacaggtctgccttgctgcctatgatattcaaattacaccttggaaaaattccaaagggtacataactcgaattaccctctaagggttgaaacagaaaatattaaatagtgactgagggtccattgtatcttcttggtagcttttgttagaagaaacagagtatttttatatatagataatttaggattattgtcacctgaaagcaaagaccaaagtttccaagactctcagaaggaggaagtgagtttaaatgtttagaacatggtatttggtatcagattgtctgaactcaattcagtttctgattcttgtggctgtgttaccttagacaagttactgtgttttggctgtactaaaatggagatatttatgagcattatataatacatgtaaagcctgagaacagtatttggcacttggattcaataaatcttcattgttgtggttattgtttttgtcatttgttggtagtaatattatttcttatctcctctgcagtgcatgaagccatgcagggaatattggtgtgtaattaatcacgttacttttcttttgataggatgttccacacccctgggtatggaaaatggaaagatagaaaacaagcaaatcacagcttcttcgtttaagaaatcttggtggggagattactgggaacccttccgtgcccgtctgaatgcccagggacgtgtgaatgcctggcaagccaaggtcaagtatactctatgcatggtgttctcttagggctccagaagaaagcaaaggccctcactaccacaaacatggaggatctgggaagcaggagtattttaatctgtttctgcagattaaaatcctaggtccaagagtccaggatgtctgtggacttgatagctttgactataactttgtctcagagagaagtcatttatcatctctgtggtttttggtctagtcttgatttaaaccaataataagcaaattaatttttctgcaaagggatagatggtaaatattttagtctttgtgggccatacattctctgccataactactcaactctgccattgtagcagtaaagtagccataaacaatatgtaaatgaatgagctggctgtgttctaataaaactttgtttacaaaaaacaggcagcgggccaaatttggcccatggatcatagtttgccaactcctcatttagacagcttacattagtgataaaaaaatgatttagatttgcaacatcatctcttattttttctttacaatttagcaatattttttcattttcctaaatgaaatgtcatctaaacttttttgttctcttccccgccctccttattttaagagctttgtgatattccttgaggcaactagaagcatagtaaaatgttgcaaaaccagagttataaaatcagtgatctaagttaaacaaacaccttccagagagttatactgtccctgatattagcccactgagtaattcaggtgatttaatttgggggtaactcttaatatttgactcatttttattaattctttaaatgacctgagatatcagaatggcatgaataacttgatgatcccttcagccaactaaatccaaattccctaatttctatcctcatatctccctcccttaagatacctacactccaatttcctggctttctatagaattccagggcctatccttaaattaggccactagaaaggaaaaaagaattgtggtgctggtggggtaaatagaaaagattggattccacacagtcttgggaactgatatctgtgtcttgaaactcattctggcccaatatggaatcacagaatgttacagtagcaaggagcaaagcatctggtctagatttttccttttaattctaaatacacaggagattaaataattttagcttagtttggtagcagaatcaggactagaatcccattctcccagtaaacaggccatgctccttccaccatttgaagcagcccaaatacctcattttgcaattttgcagagggcaaagctgacacccagagaagttaaaataataaaaatagtgttatattacatttatataatttacatagcaatataaataataattaaagagatgttatccaattctttttcagatgactctttagacttgttcatggtataaccttgtcactccatacttcattttacaatcttttaaaaaaatttgcactctctataatttgctcttagtctttgtgatataacaagggcctcaaagataaaatgctaatttttaatggtgtcatttcaaagttagaattcgggatcagaaatatgtgttttacttaacccccttccattcacatgaaatgtctttatatggtctctttagagaggttgaaaatcaaagctggacatatgcagtgatgcacatagatgctgttctctccataactaaaatgtctctacctcttttatgcctgtgaaaacctctagctggttatactctgcatcactggtacaaccttgatatgaagacacactaagataccacccagatgtcactagaggatgttatagacttaaaagttttctcatataatcattctaattcagttaatttgcttttaaaatacatatagcatgtgaatttttgtgtatacacatatatacacatacacctatatatacacatacacttatgtatgtgtgggtgatgttgaagaaacatatcaatattatttcctttagaattgaatgaggttatggtagacgataaatctcccaaaggtaaaaatttatcttagatgactctaaaactcagtttagaccttctgatctttctccaaacacatatcaccaaccatgtgattaggcattttgttaggccagagacaggacaataactgtactgtgtatcaagctctacttatggttttatcaggtctctcaaatgttacatttatttgaaatattagaagaaattgaactatttctgctctttgacattaacagggggaaagagaagttgtgttttgtaaaacaggtgaaatagagagagaatgctatccaattatttcccagataaccctgcagcaatattaccagagtatttaaagaaatttgcttaagaaaataatattcacagataatttagcagtttaattatttttccaaataaagctcatttattcattcatttattcaacaactatttattgaacaccaactgagtgtcttaacattgtggtgagtaccaggaaacaaaatgaaataagcctctacccttaagcagtaaggaatgctaagaaggaaacaattatagtacaatgtgtgaaatacttcaataaaaatttacacacatattgtggcaatgaagaagaaagagggaaagcttctaggagactgtgaatcctaagggataagatagaacaaaatccttttgagctctgtgcttttttgcataacttggtctaaaaaaaaagcaaaggttttaacatcttccttatctatgtgtttttgtcattttcataggcaaacaacaataagcagtggctagaaattgatctactcaagatcaagaagataacggcaattataacacagggctgcaagtctctgtcctctgaaatgtatgtaaagagctataccatccactacagtgagcagggagtggaatggaaaccatacaggctgaaatcctccatggtggacaaggtagagtggcatctgggcaaagagaaagcaatctgaagactgtgctataatgagaataacagtattttgcatttgacaaatatgcagtgacatgtaccacctctttaagtcttctaaatcttagttcttaaggtgcctggtctcagacaaactcctggttgtctgttttggtttgttttatttctcactacaccaggttgccctcataggaggataaatatcattgtcataaaaaaaagagtgattttatttctggtgtgtgtaaaccttggggaacttgctgatgatggaagggggaaagttatacactttagttgaggatataaggtacatgccaacaagaataaataaattaaaatgcatggtcacattttaaatgttagcaatagtcaaacatttattggtggccacttcctggcacttactatgcacttacgttgacatacatttttaaatatttacaatgacttctgtgaggtaaaatgttattatccttattttgccaatgaggaaatgaagaatcagagaataagtaacttgttcagtcatacagctaatacagacgggctgaaggcagaaatggttttgcagctgctccacagcaccatgtgagacttgtttatttttcactaatttaagtcagatcactggtgagatgaaatctatctggcatgtgatttcataactgatagaggatcatctctgtgagagtgttctatgtgttctttgatatgctcattttgagctaataggataaaaaattttctgggttgggcatgatggctcatgtctgcaatgccagcactttggaaggctgaggcaagaggattacttgagaggagtttaaggctgcagtgagccatgactgtgccactggactcaagcctgggcaacagaataagaccctgtctaaaaaaaaacaaaaacaaaaaaccttagccatttatgttgtcattaaagattttctcttatttggctttcagatttttgaaggaaatactaataccaaaggacatgtgaagaactttttcaaccccccaatcatttccaggtttatccgtgtcattcctaaaacatggaatcaaagtattgcacttcgcctggaactctttggctgtgatatttactagaattgaacattcaaaaacccctggaagagactctttaagacctcaaaccatttagaatgggcaatgtattttacgctgtgttaaatgttaacagttttccactatttctctttcttttctattagtgaataaaattttatacaag

SEQ ID NO: 81 - DNA, 7009 bp, Homo sapiens
gaaaaagcggagggagtgagagccagaggctgctgctgccgtttgcaagaactgcaggggaggaggacgctgccacccacagcctctagagctcattgcagctgggacagcccggagtgtggttagcagctcggcaagcgctgcccaggtcctggggtggtggcagccagcgggagcaggaaaggaagcatgttcccaggctgcccacgcctctgggtcctggtggtcttgggcaccagctgggtaggctgggggagccaagggacagaagcggcacagctaaggcagttctacgtggctgctcagggcatcagttggagctaccgacctgagcccacaaactcaagtttgaatctttctgtaacttcctttaagaaaattgtctacagagagtatgaaccatattttaagaaagaaaaaccacaatctaccatttcaggacttcttgggcctactttatatgctgaagtcggagacatcataaaagttcactttaaaaataaggcagataagcccttgagcatccatcctcaaggaattaggtacagtaaattatcagaaggtgcttcttaccttgaccacacattccctgcggagaagatggacgacgctgtggctccaggccgagaatacacctatgaatggagtatcagtgaggacagtggacccacccatgatgaccctccatgcctcacacacatctattactcccatgaaaatctgatcgaggatttcaactcggggctgattgggcccctgcttatctgtaaaaaagggaccctaactgagggtgggacacagaagacgtttgacaagcaaatcgtgctactatttgctgtgtttgatgaaagcaagagctggagccagtcatcatccctaatgtacacagtcaatggatatgtgaatgggacaatgccagatataacagtttgtgcccatgaccacatcagctggcatctgctgggaatgagctcggggccagaattattctccattcatttcaacggccaggtcctggagcagaaccatcataaggtctcagccatcacccttgtcagtgctacatccactaccgcaaatatgactgtgggcccagagggaaagtggatcatatcttctctcaccccaaaacatttgcaagctgggatgcaggcttacattgacattaaaaactgcccaaagaaaaccaggaatcttaagaaaataactcgtgagcagaggcggcacatgaagaggtgggaatacttcattgctgcagaggaagtcatttgggactatgcacctgtaataccagcgaatatggacaaaaaatacaggtctcagcatttggataatttctcaaaccaaattggaaaacattataagaaagttatgtacacacagtacgaagatgagtccttcaccaaacatacagtgaatcccaatatgaaagaagatgggattttgggtcctattatcagagcccaggtcagagacacactcaaaatcgtgttcaaaaatatggccagccgcccctatagcatttaccctcatggagtgaccttctcgccttatgaagatgaagtcaactcttctttcacctcaggcaggaacaacaccatgatcagagcagttcaaccaggggaaacctatacttataagtggaacatcttagagtttgatgaacccacagaaaatgatgcccagtgcttaacaagaccatactacagtgacgtggacatcatgagagacatcgcctctgggctaataggactacttctaatctgtaagagcagatccctggacaggcgaggaatacagagggcagcagacatcgaacagcaggctgtgtttgctgtgtttgatgagaacaaaagctggtaccttgaggacaacatcaacaagttttgtgaaaatcctgatgaggtgaaacgtgatgaccccaagttttatgaatcaaacatcatgagcactatcaatggctatgtgcctgagagcataactactcttggattctgctttgatgacactgtccagtggcacttctgtagtgtggggacccagaatgaaattttgaccatccacttcactgggcactcattcatctatggaaagaggcatgaggacaccttgaccctcttccccatgcgtggagaatctgtgacggtcacaatggataatgttggaacttggatgttaacttccatgaattctagtccaagaagcaaaaagctgaggctgaaattcagggatgttaaatgtatcccagatgatgatgaagactcatatgagatttttgaacctccagaatctacagtcatggctacacggaaaatgcatgatcgtttagaacctgaagatgaagagagtgatgctgactatgattaccagaacagactggctgcagcattaggaatcaggtcattccgaaactcatcattgaatcaggaagaagaagagttcaatcttactgccctagctctggagaatggcactgaattcgtttcttcaaacacagatataattgttggttcaaattattcttccccaagtaatattagtaagttcactgtcaataaccttgcagaacctcagaaagccccttctcaccaacaagccaccacagctggttccccactgagacacctcattggcaagaactcagttctcaattcttccacagcagagcattccagcccatattctgaagaccctatagaggatcctctacagccagatgtcacagggatacgtctactttcacttggtgctggagaattcaaaagtcaagaacatgctaagcataagggacccaaggtagaaagagatcaagcagcaaagcacaggttctcctggatgaaattactagcacataaagttgggagacacctaagccaagacactggttctccttccggaatgaggccctgggaggaccttcctagccaagacactggttctccttccagaatgaggccctggaaggaccctcctagtgatctgttactcttaaaacaaagtaactcatctaagattttggttgggagatggcatttggcttctgagaaaggtagctatgaaataatccaagatactgatgaagacacagctgttaacaattggctgatcagcccccagaatgcctcacgtgcttggggagaaagcacccctcttgccaacaagcctggaaagcagagtggccacccaaagtttcctagagttagacataaatctctacaagtaagacaggatggaggaaagagtagactgaagaaaagccagtttctcattaagacacgaaaaaagaaaaaagagaagcacacacaccatgctcctttatctccgaggacctttcaccctctaagaagtgaagcctacaacacattttcagaaagaagacttaagcattcgttggtgcttcataaatccaatgaaacatctcttcccacagacctcaatcagacattgccctctatggattttggctggatagcctcacttcctgaccataatcagaattcctcaaatgacactggtcaggcaagctgtcctccaggtctttatcagacagtgcccccagaggaacactatcaaacattccccattcaagaccctgatcaaatgcactctacttcagaccccagtcacagatcctcttctccagagctcagtgaaatgcttgagtatgaccgaagtcacaagtccttccccacagatataagtcaaatgtccccttcctcagaacatgaagtctggcagacagtcatctctccagacctcagccaggtgaccctctctccagaactcagccagacaaacctctctccagacctcagccacacgactctctctccagaactcattcagagaaacctttccccagccctcggtcagatgcccatttctccagacctcagccatacaaccctttctccagacctcagccatacaaccctttctttagacctcagccagacaaacctctctccagaactcagtcagacaaacctttctccagccctcggtcagatgcccctttctccagacctcagccatacaaccctttctctagacttcagccagacaaacctctctccagaactcagccatatgactctctctccagaactcagtcagacaaacctttccccagccctcggtcagatgcccatttctccagacctcagccatacaaccctttctctagacttcagccagacaaacctctctccagaactcagtcaaacaaacctttccccagccctcggtcagatgcccctttctccagaccccagccatacaactctttctctagacctcagccagacaaacctctctccagaactcagtcagacaaacctttccccagacctcagtgagatgcccctctttgcagatctcagtcaaattccccttaccccagacctcgaccagatgacactttctccagaccttggtgagacagatctttccccaaactttggtcagatgtccctttccccagacctcagccaggtgactctctctccagacatcagtgacaccacccttctcccggatctcagccagatatcacctcctccagaccttgatcagatattctacccttctgaatctagtcagtcattgcttcttcaagaatttaatgagtcttttccttatccagaccttggtcagatgccatctccttcatctcctactctcaatgatacttttctatcaaaggaatttaatccactggttatagtgggcctcagtaaagatggtacagattacattgagatcattccaaaggaagaggtccagagcagtgaagatgactatgctgaaattgattatgtgccctatgatgacccctacaaaactgatgttaggacaaacatcaactcctccagagatcctgacaacattgcagcatggtacctccgcagcaacaatggaaacagaagaaattattacattgctgctgaagaaatatcctgggattattcagaatttgtacaaagggaaacagatattgaagactctgatgatattccagaagataccacatataagaaagtagtttttcgaaagtacctcgacagcacttttaccaaacgtgatcctcgaggggagtatgaagagcatctcggaattcttggtcctattatcagagctgaagtggatgatgttatccaagttcgttttaaaaatttagcatccagaccgtattctctacatgcccatggactttcctatgaaaaatcatcagagggaaagacttatgaagatgactctcctgaatggtttaaggaagataatgctgttcagccaaatagcagttatacctacgtatggcatgccactgagcgatcagggccagaaagtcctggctctgcctgtcgggcttgggcctactactcagctgtgaacccagaaaaagatattcactcaggcttgataggtcccctcctaatctgccaaaaaggaatactacataaggacagcaacatgcctatggacatgagagaatttgtcttactatttatgacctttgatgaaaagaagagctggtactatgaaaagaagtcccgaagttcttggagactcacatcctcagaaatgaaaaaatcccatgagtttcacgccattaatgggatgatctacagcttgcctggcctgaaaatgtatgagcaagagtgggtgaggttacacctgctgaacataggcggctcccaagacattcacgtggttcactttcacggccagaccttgctggaaaatggcaataaacagcaccagttaggggtctggccccttctgcctggttcatttaaaactcttgaaatgaaggcatcaaaacctggctggtggctcctaaacacagaggttggagaaaaccagagagcagggatgcaaacgccatttcttatcatggacagagactgtaggatgccaatgggactaagcactggtatcatatctgattcacagatcaaggcttcagagtttctgggttactgggagcccagattagcaagattaaacaatggtggatcttataatgcttggagtgtagaaaaacttgcagcagaatttgcctctaaaccttggatccaggtggacatgcaaaaggaagtcataatcacagggatccagacccaaggtgccaaacactacctgaagtcctgctataccacagagttctatgtagcttacagttccaaccagatcaactggcagatcttcaaagggaacagcacaaggaatgtgatgtattttaatggcaattcagatgcctctacaataaaagagaatcagtttgacccacctattgtggctagatatattaggatctctccaactcgagcctataacagacctacccttcgattggaactgcaaggttgtgaggtaaatggatgttccacacccctgggtatggaaaatggaaagatagaaaacaagcaaatcacagcttcttcgtttaagaaatcttggtggggagattactgggaacccttccgtgcccgtctgaatgcccagggacgtgtgaatgcctggcaagccaaggcaaacaacaataagcagtggctagaaattgatctactcaagatcaagaagataacggcaattataacacagggctgcaagtctctgtcctctgaaatgtatgtaaagagctataccatccactacagtgagcagggagtggaatggaaaccatacaggctgaaatcctccatggtggacaagatttttgaaggaaatactaataccaaaggacatgtgaagaactttttcaaccccccaatcatttccaggtttatccgtgtcattcctaaaacatggaatcaaagtattgcacttcgcctggaactctttggctgtgatatttactagaattgaacattcaaaaacccctggaagagactctttaagacctcaaaccatttagaatgggcaatgtattttacgctgtgttaaatgttaacagttttccactatttctctttcttttctattagtgaataaaattttatacaag

SEQ ID NO: 82 - protein, 2212 aa, Homo sapiens
MFPGCPRLWVLVVLGTSWVGWGSQGTEAAQLRQFYVAAQGISWSYRPEPTNSSLNLSVTSFKKIVYREYEPYFKKEKPQSTISGLLGPTLYAEVGDIIKVHFKNKADKPLSIHPQGIRYSKLSEGASYLDHTFPAEKMDDAVAPGREYTYEWSISEDSGPTHDDPPCLTHIYYSHENLIEDFNSGLIGPLLICKKGTLTEGGTQKTFDKQIVLLFAVFDESKSWSQSSSLMYTVNGYVNGTMPDITVCAHDHWHLLGMSSGPELFSIHFNGQVLEQNHHKVSAITLVSATSTTANMTVGPEGKWIISSLTPKHLQAGMQAYIDIKNCPKKTRNLKKITREQRRHMKRWEYFIAAEEVIWDYAPVIPANMDKKYRSQHLDNFSNQIGKHYKKVMYTQYEDESFTKHTVNPNMKEDGILGPIIRAQVRDTLKIVFKNMASRPYSIYPHGVTFSPYEDEVNSSFTSGRNNTMIRAVQPGETYTYKWNIFDEPTENDAQCLWYYSDVDIMRDIASGLIGLLLICKSRSLDRRGIQRAADIEQQAVFAVFDENKSWYLEDNINKFCENPDEVKRDDPKFYESNIMSTINGYVPESITTLGFCFDDTVQWHFCSVGTQNEILTIHFTGHSFIYGKRHEDTLTLFPMRGESVTVTMDNVGTWMLTSMNSSPRSKKLRLKFRDVKCIPDDDEDSYEIFEPPESTVMATRKMHDRLEPEDEESDADYDYQNRLAAALGIRSFRNSSLNQEEEEFNLTALENGTEFVSSNTDIIVGSNYSSPSNISKFTVNNLAEPQKAPSHQQATTAGSPLRHLIGKNSVLNSSTAEHSSPYSEDPIEDPLQPDVTGIRLLSLGAGEFKSQEHAKHKGPKVERDQAAKHRFSWMKLLAHKVGRHLSQDTGSPSGMRPWEDLPSQDTGSPSRMRPWKDPPSDLLLLKQSNSSKILVGRWHLASEKGSYEIIQDTDEDTAVNNWLISPQNASRAWGESTPLANKPGKQSGHPKFPRVRHKSLQVRQDGGKSRLKKSQFLIKTRKKKKEKHTHHAPLSPRTFHPLRSEAYNTFSRLKHSLVLHKSNETSLPTDLNQTLPSMDFGWIASLPDHNQNSSNDTGQASCPPGQTVPPEEHYQTFPIQDPDQMHSTSDPSHRSSSPELSEMLEYDRSHKSFPTDISQMSPSSEHEVWQTVISPDLSQVTLSPELSQTNLSPDLSHTTLSPELIQRNLSPALGQMPISPDLSHTTLSPDLSHTTLSLDLSQTNLSPELSQTNLSPALGQMPLSPDLSHTTLSLDFSQTNLSPELSHMTLSPELSQTNLSPALGQMPISPDLSHTTLSLDFSQTNLSPELSQTNLSPALGQMPLSPDPSHTTLSLDLSQTNLSPELSQTNLSPDLSEMPLFADLSQIPLTPDLDQMTLSPDLGETDLSPNFGQMSLSPDLSQVTLSPDISDTTLLPDLSQISPPPDLDQIFYPSESSQSLLLQEFNESFPYPDLGQMPSPSSPTLNDTFLSKEFNPLVIVGLSKDGTDYIEIIPKEEVQSSEDDYAEIDYVPYDDPYKTDVRTNINSSRDPDNIAAWYLRSNNGNRRNYYIAAEEISWDYSEFVQRETDIEDSDDIPEDTTYKKVVFRKYLDSTFTKRDPRGEYEEHLGILGPIIRAEVDDVIQVRFKNLASRPYSLHAHGLSYEKSSEGKTYEDDSPEWFKEDNAVQPNSSYTYVWHATERSGPESPGSACRAWAYYSAVNPEKDIHSGLIGPLLICQKGILHKDSNMPMDMREFVLLFMTFDEKKSWYYEKKSRSSWRLTSSEMKKSHEFHAINGMIYSLPGLKMYEQEWVRLHLLNIGGSQDIHVVHFHGQTLLENGNKQHQLGVWPLLPGSFKTLEMKASKPGWWLLNTEVGENQRAGMQTPFLIMDRDCRMPMGLSTGIISDSQIKASEFLGYWEPRLARLNNGGSYNAWSVEKLAAEFASKPWIQVDMQKEVIITGIQTQGAKHYLKSCYTTEFYVAYSSNQINWQIFKGNSTRNVMYFNGNSDASTIKENQFDPPIVARYIRISPTRAYNRPTLRLELQGCEVNGCSTPLGMENGKIENKQITASSFKKSWWGDYWEPFRARLNAQGRVNAWQAKANNNKQWLEIDLLKIKKITAIITQGCKSLSSEMYVKSYTIHYSEQGVEWKPYRLKSSMVDKIFEGNTNTKGHVKNFFNPPIISRFIRVIPKTWNQSIALRLELFGCDIY

SEQ ID NO: 83 - DNA, 80264 bp, Mus musculus
  misc_feature (1)...(80264): n = A,T,C or G
cccacagtcctccacttcctggggtgtcagccacagaacaaagccagcagagactccatcagcgcctccttttctcctcatcctcccaggcatagctgcctctgcctctgcctctgggtaccatcccagggaagcagaagatgaagtggaaagtgtctgttctcgcctgcatcctccacgtgcggttcccaggagcaggtaagggctctgtttcccgcggctcgacccttttagagcctctccgtgtgtctgaggggcagcggaggggtgccaaggacctggtgcttcttttaaagcttgtcttcccaaagtcaacgggcagagtgggcagcggcagtgtgggcttgggtcccacccaggcgtctgctctgtgacagccaagctggttatcggttgggggccagctgtttgaaaacacagttgtagattgtctaatgataaaggcaaaagaaaaagactgtggagggaaagggcaaggagaaacgcagcgagtcagcaactgagacagctctgcgcggacgggagaagcggcacaggatccgaaacaccagccagctaggcctcgctcctctactctggtttccagatatcatgactccttccgcccctctctggttggcattgccgctcagccccgttctttcctcctttgccaataaaggacattgccatggtcagtcagaaagggtcatggcctgtgaccctgagtatcctgaaacatctggtagaggccgagcccctacaagagaacttgaggcagggagggagggaggcgtacggagtaggcatccatatttgcagccttttgcaaggcgcattgccaccttctggcccagagcatttaagtctaagctcaccctgtcaaggctgtcccccacatcacagccaccagctaccctatgacatactgattctctgtgatatactcacatggctctctatctgagccaagcagccagagacacggacagaaatgctagcaacaggttgaagaatatgtgttaatacgtgaccatcacgagtcacaaccagcccagaagacaacttgcgccagagcccactgcatccctccaatgcctggcatttggcatgcggtagccttagtgtgcttcctagttcagcagtcggggtggaagcgagggaacagaagacaaaagacaccactcacaagattggtgtcatggccgttttacaagaaatgggacaatctgtatttgaatctagaaagacaaggatggtagctgtaaggggtacccttcctccaatttagagctctcctgagggtgacagtttgtcgggtgacaaggcaggaatggccaacacatgattgttaccaccaggaaactgcacagtcctgggctagcgtcatggggttctgagggctcaggaatgggcttttctgacctagcacagtgcttttctcagaaagggctgggcaggtgtgactcacacagtgctgtagggtaattgcccctgagggagccccagaagccctcactcataggcaagtgagaaacattttcacagccagagaggttcactgactagaggagcagccactgcaggcaggagctctggactcatgaccgtaggctctcaaaagatggagggaggcgaatgttgaacttctctcgccacctctgtctgcacctcactggtcctggtccctgcgctgcaggctttgaagctcaagtaaagctaaggcaagttagggagagaaacaaacggttggcagtaaacaaaaccccacccagagggcacaaagcctgtggtcttttccaccccaaaccaaaaaggcctaagcctttcccatttacaattctttgagaaagcccagacacaggggactaagccaatgttgaactaattaatcagtccaccaagtctaacaagagcatttcgagggccagaggaggcagggagctgctgggtgccacggaacacctctgtctgccacggaacatgtctgtctgccacggaacacgtctgtcggccaaccgtcagcttcttgttacttctgactgccccgccatggcaaaggttgaaaacagaggtcactaccgtgtgtgtccactctctagtgagaaaatgcgcctctagtgtgaagcctcgggtttatgagaaggtctacttcttaggaaggcaggaggcaggggcatgctaaccattgcccttcccagtagcaggtccctgagccacccactggatctcaatggtcctgggttttgttagatttcctctaaagcaaagacagtaatggcttcctcgaagagacgtgacggcaaggagtgaatgcaaggtttcatatacagagatacgcatgcatgcgtgcatgtgtgtatctatgtagatctacagatgcacacataggcacacatgacagacaattaataaatagaaattgcactaattattagatgcagggatggaacctatggctgagatccttaatttataaagcagcaatgggcatctcctgatagcatacgacttgtccctcctgtgaattctgggcacatccacaccagcacagaaacccagtggcaggtgggccctgtggcaaatatggatcaaaacttgggatttacagaggaagaatattacaccaacaaatttcaacctcttaagctacacaggaacatgtttcctcagagtgaaaagaagtccaaaggtgtagcataaatacaggagactggacaaattcaaagaaaatgcgtgatcatggtggccactcaggtctgcaggcatggatgtgggtgaccagggatttatttacaaatatcataaacaccaaatctctgttgaagctttggaagtggagttgaggggctgtaagtgacggatgtgtttcacgggtgtcgtcttcaccctctggtttgttttgtcctccggcgcctaactgcttccgatcctctggcttcattttcctacttcagccctgctcggagctgctagactgcagactgcatttgttgccacaaaacaccaacagccctaaggtttgttagcaggctagctttattacaccgctagctttattacactgctctgtgcgcttaacattgtcagttttgcttttgttttttttgaaaaataagactaattgggtgtgatgacacacacctggactagcagcatttgggaggcagagacaggtgggtctctgtgagttcaaagtcaaactggtctacatagtgagttctaggtcagcctgggctattagtgagacactatatttaaaaaaaaagatttaatttttaaaaatatacatcttttctttcaaaagttacctagcatgtttcttgtattttatttagaagattctgagctccacagagaattgtcttaggttcgattagaataggcacacaatttgagaacacccctgtttttatatctagttaactgattaaacaaatgccagaaatagttcagaatagtttggttttagttctgcatgagacaaagctgctgctcacttacaacaagatgacagtggatgtaatcaactagaataactacccagttattctggtagaaaacagtaaaccggtcatgtgacctgttagccgaaacatgtcattttgcaattgtgcactatgcgtggatagtgaccacgttccccagggaaagagatgcccctggctgctctcagtcacatccctggtgttcagcataatatttagaccagagtcaatgcatggtacatattccagtgtttgttgaatgcattaaaaagtgaccaagtaaaggaaatctagaagtttctgcatgattcacatcatggttttattagatggcctatcctttaaacaacctagtggtaaattatgagtgttaaaaatacaactaaattttaaaaaatcagcaatcaaagggtcagtggtgaccagaagacttcagcgtgagttacaaagttagtttaagactcaaaatggcaattattaaaatgttcttgttcagccatgtgaaattctactattaatatttgcttgttctgagttaagggggtcctagaagcaccgtgtgcatgcatgttaggcaaacactctaccactgaggtatttcctcagctccccaccccctttatagaattttgtcaagatctctccaaatttcccagcctgctgaactggactcattttcagttcaggttgtcctagaacttgcagtgttcctaccttggcctcctggtagctggaactgcaggtctgtgctgtgagactcagctatttattttggacccagagaaaagatcatttcaaatgactagactaacactaatatcttaaaactaagcaaaaatgcactgctttcagcttctgccttttctccagtgctgggggaaaggtgatcaatattggagactggtggtcaatgagctgataaagtaatgaaagtgtcaggagtagaagaccctgtggattccagcaggaatcacagtccagcatgactttcatgtttgatcttcgtgaccagtttgcaaatacatgcgtcatgctttgcccagtatttccttcttggtggacatttgggtcattgctaatgcttgttgttacagatagttttcaggacaatatacatgtaacggggtggagggagtcgtgcaaattcaaggctggcaattaaaaggacaggtcaaaacaaaagaacgattcataggggactccagactccagttgagaacaatcctgttggggaaagaatgtgtctgtccgtgaccatctacaaatggtcgtgcggtgtgctgtgagagagaggacactgtgcagaaagaaaggtctgggtggaagtcaggcctcctccatggcccctgtcgtaggctagcggctcacctcaactttttctttccttcgtaagatggcggtgaaggtgctcccctcactaagggccttgtggagtgtcccggctcaggatgcttggtccttactgtgtgtgcctcagcttcccagtcttcagaataaaatatcatcctcccccactcccccccgcccgagatgcaaagcaggaacgcagctcgagtgtgcctccctcctcttcctctcactaaactgcagtgtaaacttgggcagaaatggctctctgagccttagttttctctggcatgcgatcgaatctgaaaagcaaccatttttcgacctagagctccaatgcttctactggttggggctcccaccttagggcactgttctgaacttgatgggaaaggcctctgctttggaaacaccaagattttctggcttgtcgattgcagatttattgagggccacgcagtacttggttggcgagaaagtaaattgatgcttggagtgactggaccgcagtacgggtccacgctaggctcctgtgctccgttttgcctgtctgatggctgtgcacccagagtttcagactccagggggcaaaataaacagaaagcaggagggtaagggcgagttgaccccatctagacctctgttttctgttttctcgagtgtcaccctttgtatttacagagaacccatggtgtggctgatcccagctatcctatggccggtagctcagaaaggtgtagagttctccttttgtaagtgatggaaatgggaccagggatgtgtgcctggaatcccagcacgggagagagaaagagatagaaggagcagggctccatgcttatccttggctattcagaggttggaagccagcgtgggctgcttgagacttgtctgaaataaaaacattaaaatacagagatgattacattcaaaaatttgatggcttggtcaggaggactgggcctccaacgtgcgttctccgcagccgttgtctctgattgctgtttgctgattggcattaccacacacccgaaggccgaattctgaagcagactttaaaagaattccccttaggaagtgcttaattctattttcttctcaattttcaaagttaaaaaaaaaatcattttgacactgaatatctttgtttggcatacagttttctgctgagtaggaaatccgggcttgtttagaatggaactctgttcatctctggcattattatagatctgagttcacacttttcccaaacctggtaaacccatattttccattttagtcttaataaatgtaactgtttggggagttctccttgggaaagacacatctcagttgcagttgcattcctaggggcgccctccccctcagactcccttatgcatggaaaataaacttaaaatgtaaactaaaccatatttgagagggattgctccaaagaattgactaaaagaacatgttaggaatatattttgatccggtggaaaagccttattgggtggctattcaatactctcaaggaatagtacaatgatagccctagattctaaagtgattttttaaaaattatttatttttattttatgcgcattgatgttttgcctgcatgcatgcctgtatgaggtgtcagatcttggagtttcagacagctgtgaattgccatgtgggtactgggaattgaaccccaggtcctctagaagggcaatcagtgctcttaactgctaagccctaatgcgaatttttcaaaactgaattctcaaagaatggtagaattgtcactgagtgacaacggtttttgattacttatgtttactttcagcacggggctgtgtgttcagggagggcaaggccttatgctattgatggggggcaaagtaaggcaccctaagaagtcgatgctcaaaacaaaaagcaggaagcactgcagaaccagaaacacagatgtctgtgtttcctagagtgaccacttcagcgggacgtttgtctatacaacaaacaggctggcgcactgtaaatagtttccttagccaaactgtggggacagaaagacagcggggctcaaaacacacaccggcatggacactaccacataggattaaataaatgcccactactctcttgctgtagagactggaactccagccatgcataactatataggtcttcaatgtgtgacattgcactagcccaagatacactatgactgacagccctcagccagacctgcctgttctctccctagactgaaaggtgatagtgggagaatccaagagaagagggggtttcctaggggagagagaagagatgcttaggaaggggagtggaggttgcatcccattgcttcagaggagagatggggaatggagggcaggatcaacctgccacggagccagactggatcagtcatggagtggcctgagcctgagtaccatgggttaaaagctcggtgtgatgctggtgaacatgcctgtcgggacgcttccactcatgctctggcgggtgcaggagtctatgtcccagggttcatacatggatgacaaacatatcctcactcagtgtgctttttgggtagaatccaaaggaatagcatccagatagatgtagattctaaggtgattgtgagtgtggtgtgtgtgtgtatgtgtgtgtgtgtgtgtgtgtgtgtgtgtgtgtgaaagtatgattatgttagtgaatgctgctgtgtctatactcactgtatgctaatgcatgtacaagtatctgcaggtatgtgtatatgagcacatcaacatgtagccttctgtgtatcggtatataccatatgtgtctttaagaggagttgttggtctggccccactctgcaggaacaccctgtctccaaaatgaacctggcatttccatctttgcacctctttccacctagttcccaagattcaaaatgctaaaactctgccttactctcagctgtgggaaccctgcctacccacaatgctaagcctagatatctgatgatctcccaaactcataaccatcataaattatctgcattcaaatggcaaaataaggtggaaaattgttctcccaactcaagcttaaaaacacaacataaatatgtccctactgcgagctcttctcggagtttaggtctggcacacagacagtttcagggacacacagaaatcaccagaaaatgtcacctgttcctccaagttctcacaagttccttccataacaatcatgtgtgtttggaggcaaaagagtcaacacacatttgatgtttttcttcttgcaagcaatctaacaaggtagcccctagtgagctgctttggccatcatagcagttggtcaagctagtttgtttttagtgtctgattatctaagctatctgactgactaattcatattgattaaagcaattaaatgctctgaaagcacccccctgtgtctccagccaaataatctatagacgatcagtctaaccagcccactgagcagacccgtttcttagagatggacattcacgatgccggaaaccatattctctggttttcaaaagagtctgaatgtggcttccgacaccctgcttcatggtctggcctaatttccatcagttttgtcgacctgtgctaatttccacgctgagttcagtagcaaagacagcacggatggattggatgccacccaggactgttttgagttagacaggagggcttcagaaattcctcttttgatttctcagagcggagagaaatctttgtcttttctcccacttaactatcggtgcttcaaaagcccagacctatataaaatacacaaatgctttcgagacaaaatgaatcttgcccggtttctttgggcttcggtgggaacaataaagatccaactacaaaaggttggcaaagaggattattctttttctttctattaagcatagaggcttcaaaagaacagcccagaaagtcaaataattgtatccaccactgttcacccatccatctccccgctgacctgtcctgtgaaatacccttgaaaatcttggccgtctctcacctgcccattgcaaatgctgctttgttaaatgttcgagtctgtaattccacgagaaagacctgataaaacaaactgtatttcaatggccacctcatcggggagtagctctttgggctggggggtacttctaattttcggagctttgtagtctctgtgttgggagggggctacttgaagacctgaaaaggagatgtgaatcaagtctacaaatgtttgctagccaaaggggccaaggtggctgcggggaagtcttaggaaacaggtttttgatcttcatggagatctcttgattgctttagtttgggaaaatacatcattcgcttctttagatacaaagtttgagacttgaagctggtctaattgctagcttcctttcagtcctgaacttcctcagaaacactcttgtcactttgaagagcacaaaatggctccttgacaccgagagacacagagaaagattaggccacttagagattcttaagttcagaattgaatgttttctagcagtggtcaagtccggaattgtttcagttttaaaaagcagaatagcagcctctcagctgggcaagcacctaaagtttagtgcaggatgaccatgaaagataatcctaagttgctggtgcagaaagagggtctggtgttgcttggcttgggatgctgtccctagacagtctcttcaaacccatggccttgggttagggagatggctcagcaggtaaagtgtttgctgggcaaacatgaagaccagagttcaatcccccagcacccgcataaaaacaggtagcagcacacacttgtaaccctagctctggaggacagattcatgagttccaggggctcactggcctgcaagccaatttagtgtaacagtgagatctaggctcagtgaacaaccctgtttcaaaaagtaagatggggaagatagaggaagacatactgacatcaggctttagctccacaaagcannnnnnnnnnnnnnnnnnnnnnnnnnnnnnnnnnnnnnnnnnnnnnnnnnnnnnnnnnnnnnnnnnnnnnnnnnnnnnnnnnnnnnnnnnnnnnnnnnnnnnnnnnnnnnnnnnnnnnnnnnnnnnnnnnnnnnnnnnnnnnnnnnnnnnnnnnnnnnnnnnnnnnnnnnnnnnnnnnnnnnnnnnnnnnnnnnnnnnnnnnnnnnnnnnnnnnnnnnnnnnnnnnnnnnnnnnnnnnnnnnnnnnnnnnnnnnnnnnnnnnnnnnnnnnnnnnnnnnnnnnnnnnnnnnnnnnnnnnnnnnnnnnnnnnnnnnnnnnnnnnnnnnnnnnnnnnnnnnnnnnnnnnnnnatgtcccaatagaagttcattgaatgaacctgtgactcaagtattttatgttataaacatgtttaagtttagacaatgctaacacaatggtaggtgaactaggctgaaaaggtgtagggatctctactaagtaacaggaacctttagtcgctggatagggcgtttgaaaagctttatacaagagactgtggtataactatcttaatcagtggttctcagcctgtgggtcacagcccctttgagggtcaaatgaccctttcacgggggtcactcgtcagatatcctacatatcagatatttatattaaggttaacaacagtaccaaaattatagttataaagtaaaaatgaaaattattttctggttgagggggtcatcacgacatgaggaacggtattaaaaggtcaagaagcaggcaggttgagatccactgctcttaacactaactatactcaggggaatgtcatttaaggaaaagctataataaattctttagtattatgaggattaactttctaatttagttatttccatgaatgatactttttattagtttcattttctcagaaccaacaggtaaactacacttttaaaaaacatttattattgttattttgtgtgtatatgtgtatgtacatgtatttctgccatggcatgccagaggacaacccaagggagttggttctctctttctccatcatgtaggggttggggtccagctgaggttcataggcttggcagcaacactgagccattttgggtaaagaaggacccagaactcctggtctgctgtcagcgtggatgagcccctaaaggagaggtgaagcacgagagctcggccataagggctttctatgaagcctgttctctctgagattcccccatctccacccctgcatgttctagtggaggagacataagaaattctcagtgctagcaagtcagtggtgctattgattcttttctaagtctgtccagagcaacggtagtaatggcagcaagcaactggtcctagtcctgtttgacaatgaacttcgcctctgacaggaataggctgccctgctagaacaagctagtagggaaaaagaccgaagccatatagagaagaacaagtaattttcatttggtgaagaccctgctttatagatacacttcattgaggctcgagagacagctcggtggttaagaacactgcttcctcttccagaggacacaggttcagttcccagcccccagatggcagctcacaatcacttgtaactccaggtgcaggggatctaatgccttcttctggcctgagggcaccaggcacacacacagtgcacatagatacatgcggacagatacacattcattcacagaaagtaaatacatcttggggaaaaaaaaccacacttcatgggctagagatggggttcagttgttaagagtgctcacctagcatggataaagctggcagatctctgtgttcgaagccaacctggtcttcagagcaagttctaagatagccagggctacacagaaagaccctgtctcggaaaaacaaaaactgatggatgagaacagggcccacagaatcaactaagccgagctcatatggggctcacagagcctgcatgagtctgggcttggcctctgcatatatgttatgactgtgtacctgggtgttcttaaggtacctctaacaaggggaatgaggggtgtctccaactctctggcctgtgcttgggacccttttcctcctccagtgttcctcgtccagccttgatgtgagcctagtcttatagtaactggatatgcatgctcagttggcatccctgggaggcctgctctcttttgaagggaaacagaggagcagtatatctggggaggactgggagttgtgtaagaaggaaaactgcaaatggaatggaatgagtgagagaagaataaaaatgaaaagaaaaaagaaaagcactcaaaaatccaacaagaaagatcaaggtggatgtctccccccccccccccaggaatgagtgcaagtttgatccctggcctcgagatgtgtacagacatgaacacaaatatgcatacactgtacatacatgagcttaaaagccttcaacatagatctctgaggggacaaactgttcaaagcacagaagccatggtattggtttctgtacccactacaaaataacaatgtaccataaagtagtggctttttaaaaactgacatttacaaccagtcatggtgatacatgcctttaatcccagaagtcagggggcagaggcaggtggatgcctgtgagttcaaggctagcctggcctacaaaacaagtccagaacagccagggctacacagagaaaccctgtcttgaaaaaaaaaaaaaaaaaaaaaaaaaaaaaccaagcaaacaaacaataaaaaccctgcaatttaaactgcgatatgactcagttggtaaaataagtgtgaacacctgagtctgggctcataacccactttttaaaaatgccaggtgttttttcatggtgacacacacacattttaccagttttgagacagaggagactgacagatccctggggtcactagctggccaccctagcctattttgtgagttcccggccagtgagagattctgtctcaaaaaagtagatagtatctagggacaataaccaaggttgtcctcttgcctatgcacgtgcacacgcacacacgcacacacacacacacacacacacacgggcggggcggggagggatccaaaaaatgtattgttctacagttccacggttctggaagctagcaatccaaactcaaggtgtcagtgggtctgtctcttctgggggccgtgagggacaatctgctcacactcctttcccagatcaagacagttttctggggtattggcatatcttggcttgtggctacatttcagtccataccatctaccaaagcttcctgggaatcgtctttcaatggacgctaatcttggccatgcgttcagttaaggatgttatctagggggcttcagaggggcatgaagctttgctagcaccatgtaacaggcgtcacagagatcctgatctgagtcaatcctgatttgatgtctcatttaaatgcaggcacattcctctcagggtctttgaggactataggcaaagctgcttctagggtggcctggtggccgagatcagggagggacacttgcagcctggggtccttttaacccatgctgctctgactggcacagctgcagagcacagtctccggaagatggaataagtgcgtgtcagagggatgctgccttctctctcggaaacaccggggttgccctttagaaaaacatcaccaagcacattctgtagtctcagaatgagttcgctggtgattcaggcagtggggcttgatctgagtttcagacatctctattcatttcacggcctctgtttcccaaggcaaatctgccatcttggacccacagaacagtgagttggcagagggatcctggcatgagaaaccatcgtgcagctgggacctgactcttctgtcttctgtgtggtgttctgagctggggaagaagagagtgggtttccaggtcacagctgtcaggccccacctgtggggtgggtggctctagctctgtcgtcagtggagaagtgcttcaaacacgtcctctttgggaaggtaagctagggatccgctgtttatccctttagctttctgccatcagcaaacatttgagaaactggattagggtgcccctctcacctctgagaaaacagtgtgaacaaagcagcatctcatgtggggcttgatgagagcatctgttgacctttgactctgctacatcatcacgtcccttcctgcttcaggggcaggttgtctgtatccccatttgtgctgctcagcccacactgaagagcctagattctggaaccaaacagtactgccatcagtactttttagccctctgttcttggggcaactaaaagctctgtagatctggggatccttgtctgttaacagctgtgtagtatctactcaaagggctgacttaacactgcatgaaaaatgtcgggtttggtggctagcacattcattgaatccatgttggctcataagggacagtcatactgtgctaccactggggcctgactcatgccatgaaataactgtggttatattaactttaactttccaggtagttatatttagctttttttttcctgatgtttttatttctttctattctctagatgcctaaagtcaacccttggttatcctcaaatggtaacctagtgtttaggccaaaggactaggtaccaaatcttgaaggacttatggtccatatgagtttcttcccactttctcaatgctgttgctatagccccaaaagcagccacacactcatgcaagcaaatgagcaggagatatgcaagtaaagctttattgcaaaaaaacaggccctgtgggtcagcctttgtacaccttggtcaagaatagtgggaacagaagacagagacctgggtccctgtctacctccacctcttggttttccatctctgttcaggaggaagccccactggtaagcaacagccaccagtcagagagcagcagggagacacctgcggggggccatccccagccgccactgagctggggtgggtggtttgctccacaagcagatagcacaaggcccaagcttaaagtcaagatgacatacatttgttggcggagcaccctccaggcagatcgctgtcttgctgaagtgaaatggaaaatcaaatgtgattctgctggccccagtgataaaagcttttgttattgttctcagactcactgtgttcatggagagtttagtcataggggtttctattctcaggaagtcacagcacatcacaatacaaggctcacctgtcttctaaatagttgcgctccacataacagggagggggcaattatgagaaatcatgtgtgctacaatagctgtctaccatcagataaaagttaataaacagcacatatgtggtataggggccaccttgctaattcacaccagaaaccctgtagtcaatcaaggggatgatgtatttttatttccaccttttatgaagtctttgaggttgtgttgatttttgagagtgaaaaatccagcatcctgtcaaggaaagatgaagacaaactggaaagttccatgtggtctgcctcagcgtcctaagcattgttctcttaatgcagtggagtagcctctggaaagcaatcatctcctttgggttgtaaataaaataaatcgagctcaatggttctctttcacgatatagtgactattcctccagtgaagcataatacacggaagctcacccagaggagcttcgcatacacagtggtaatgggaggaaaactattaataataattttttaaaagcccctcccacttgcctcatggacgggaaaccttgtgtgtgtgagcactcaagattggtgacaatgaagttggaatttgagttccagactctccctctgttcagtgatgtggggccatttgggtgcctgtctctggcctggagagacagggtatgactaggggtagctttatgggaaatctaaacctgacaccccagcttccattattacacacacctctcattttctgttgttttccttttagaggttacattttccagtcctggttttaacccctaaattatgtaaattccataggccgcttttgaatacggcaagctggaaaaactctgtaaggcccccactgcctcgcctaacaggatgtggccgcttctctgagccctagctgagcttttctgaggataagacacacttctccctttggtccatctctggctggatcaaggccctctcagttgaatgctgggaacaggaaccaaccttagctctgttagtatcttgacctaaatagtcatgttgaagcctgtcccatgtgctgtggaatgtttaatggtatccctggcctcctctcgttagatgtcaggagcacttccgacttaggacaagcttaagtgcctttagatgttgcatgaatgtcccctgggggctgagaaccagggagatgaattgtgatttgtgttcttttgctcagtgatgattagcctgtgataggctattctcactgcattcggtcatcaaatggaccaagaggctgcaacagatccaattctaagcattccccagcaccacggaaatgacagctttggagatgccaggtgccatgtgaacattggtttctgaagtggttctatcaaggacggccatcaaccacggccaggctaccagttgacttcaggttcccccacccctgctggcaattccttctgtctttcatctgcatctctgacaatccaatggggttgagtgaggtcagttttagcagaagtggaaagataataggataatagatttatgatctaaattaaaattctggctttgtcacagctagttatgtgaccttgggtcagttccttggcctctttgaaacaatcttcttaattaaccctgtctaccttgaggccttgttggcaggattaaaagtagcgcatataaagagcccaggtggaagcaggcacctggtagctctataataaacgtgttctagtactataaactgaaaagggtgaatgactagtgactgggtaagtagaaaggccaagggtatacgggaagtgtcaatggtgacagccggtgactgcacctgactgtaaccaatctccagcttgtccatctctggagcatattcttattgtcagctccaagaatccatctccccctggcttttctctccctgtctctacttctctgacccctggaggacctgatctagggcagaaggctgagaagatgttggtttgtgtagacattcaaggctttggcaactgatctgaacccacatgtgaaaaactagagaagcctctggcctaatcggtgtgaagggggaaaagctggaagacagctgtgtctcagcagtgagcaggagctactggcttggtaggagcaggaggagaggccataggacaggagggatggcagaaggctgccacaacccagggatccaagaacaagcgactggcactcaatatgaacaaccagggagaaagggcccacacttcagcatagccggaagcagaggcatgatggggggacattttttgatcctccctctcatctcccacttgtatatcttggaatctgtgctccgtcaggaaccttgaagacgcttgggccttaactctatgtccgtggtcctgggtaaggaggcggcagaatggcgagcctggtggctgagccaggaaagctaaggtgagattgaggccacagctgggattgatcacccctgaaataggggggttctcagtttgttcctgttgagacttggccagtctaggtctgccgagtccagggctctgccgggccaggctgtctctcagcttttatatcttcactgtcctggtctcacaacaaatgccaactacatttacactctttatgctcttgcttatttactgtcgcccctaaaagtagtcatttaccactcagaaagtcgccctggccctgaaacaataaagacaacgagaactgaacgcacaggacctggaggtcagcaaaaccacggcatcccgcttaaaatcgaacaggcctcattttctgcgtttagaacccaaacacgcacactttaagagatactatttatcatattttatgaggtcaaatcatagtatagaaagcttggaaaatatagaaagaagaaaaaaaaagatagaactaaaaaaaaacattctttaaaaaaatgcacaccacaactcatgaccacgccggcctctgttttcctgggctgggagaaacatgcacttaattttgtaaccgttcttttggccagacagtaaatcacaaacatcccttctcgctgttgaatacttctggacagcagttttaggacctgtggagggccgtgatttatgttccctctgcctacgggacatttagatggctttgacttttgacacattgtgaataatgtccctgtggacttgttccccattcctgtgaatgcctcggacaccacatgtgtgattgtctccttggaatcacctctggcagtagaaatgccgagtgtctctcctctggaagcgttatggacccacgcgttgtcatgcacttcctctgtgatgttttctaaacttcaggcctgtctctgtaagaaagagattgaacatgtgacatcgatacatcggatacctggcctgcagatgtccccttaggacttgcctcccaacctcaaacaccgtttagacttctcgccctccatgatagcatacttggttatgtttccccactcccaggccctgcccactctctgctctccgtgaagatcctacctgtcagttggctctgctattatcctttttggcccaactcatcggagactcagttgttcccaccaggttccttcttcctagtccctgctgcaaagcctgatcctccacaggatggagcaacctccatgctcagagtgagaatcaaagcctcatggcttctggactcagggcgagccttagctttgagcagccctgtactaaggcatgcacacgtatggatactatggatatgcagaactctgggatctgagggtttacagggctctcatgattcaggtgtggccccaggccaactgagaagcctcctggagtcagaaagttgatgccacctccacaatgtctagtaccacctcccttccaactgtgctgtcacccaactgtgctgtcacccaactgtgctgtcactcaacagcgtctcccaagggtgcagttccagtgttgtgagaacactgctgagtgagctgggacacagctactctgctttatctcacaatgcacaccactggaaacatgcccacaagcaaggacagccattaacattattcatacatttacttattcaacaaatatttatcaagtgtgcataatgccagggggcctcaatgtgctttataaacaatcacgaacaaaataaaataaagcaacagatccaagaccctacagagctaatattttaaagacagaggcagaaataaagcagggtaagtaagtcaatgtgtaaaatgagtcctgctaaaagctaagaagaaaaagaagacagcatggagggttgaagaaaggtggcatgtgtcagcaggaggtgtgcagggatcccgttatggggagatggtgtcagaataaagatgggaagtccacaagtaagccagttcagacatgggagaaagcagtggacagcagtgtgaagggggcctgtgctccgtgctcactgtgctttgtgctccatgttctgtgctctctttgctctgtgctccccattctcagtgctccctccatgctctatgctctatgatctatggtccatgctctgtgctctctttgctctgtgctccccattctctgtgctccctccatgctctatgctctatgatccatggtccatgctctgtgctctctgtgctccatgctccccatgctctgtgctctgtgctccaagaactgcaaaagatggagagaaagtaggagaggcccggagaaggcgtgctcagcagtgagcctagcggtggaggctggagagtggcaactgcccacaggcttgaatacatgtgactctgagtgaggtggatgctggtccttggggccaagaactaatgttatgtcgtagcaagcttagcctagcactttacacagagaggaaagacagaaggacttggttgtgggtactgagcttgtgtctcaatggttgagcatgcacaaggctctctctgagtttgactcccagcactgccccaagataaaacaaatctctagaaacaaacagacagacagacaaacaaaatacagtcattttccagcttcctgtacttgtgggttctgtttctacagagtcaggcaagttcaaactttttctaattataaaaagccccaagagtgcaaacctgaactgttgtacatgaaagaatgtctaatagtgggatggatatggagtgatgtgctggctatctttccatagcttccctcccatggggtcataagccggtttccctctggcatccgctgcttaagacagcgctgtggtggtcttgtctgtcttaaaagtgtagttttgttgttgttgttgttgtttggagggaaattccattgtttctaaaaaatgttagacaacacagtcacattagatgctaccagtaatctagagatggccaagtgagtgggacagtatttataggttatatgcacatgccttgccatttttctaaaaaaaattgtttatttatgtgtatgaatgctctatttgcatgcgtgcctacataacagaagagggtctcagatcccagtatagatggttgtaagacaccatgtagttgctgggaattgaactcaggacctctgaaagaacagctagcactcaacctctgagccatctctccagctctctataccttgtcattttgagaggtacctgaacatcctcagatcttgtctccatggggctttctaatgtagcatccatgacggactggacatacacttagtggtgtttgctcaacacactctcactgagctcctatctgccaaccttgtgtggccatactgatgatgagagcgagagagagcgagagagagagagagagagagagagagagagagagcattgtccttcatcaaacagcaagagggctgttccataccatgaaaagagcagttatcagtctcagctgcaggctggacacacccatttgtcactacctttattcctttcacaaacccttaaggtaaatcccatatttccattttacagaggaagaaagtgaggctcatagagggtgcacatagccaagcctactaagtgcctagtcaggatgggctcccagaactttgtttttttttttttccatttttattaggtatttagctcatttacatttccaatgctataccaaaagtcccccatatccacccacccccactcccctgcccacccactccccctttttggccctggtgttcccctaaaaaatatggaacgcttcacgagtttgcgtgtcatccttgcgcaggggccatgctaatcttctctgtatcgttccaattttagtatatgtgttgccgaagcgagcactaagatttatttatttattatatgtgtgtacactgtagctgtcttcagatactccagaagagggcatcagatttttgttacgatggttgtgagccaccatgtggttgctgggatttgaactcaggacctttggaagagcagtcggtgctcttaaccgctgagccatctcaccagccctctcccagaactttgtaactgaaaggccttcaaaccagcactaaacaagcgttgaatgtagctggaagctttctcctaccgttgaactggaaagttcctctctggctgaataaaaagtccactgaaatctttcaggtagcctgtgaggccaccagccacgacttccagctggtctaacttctgcagtgtctgaatggaggatccaccactgttcccaggacccgaaaaccataataggacaagacgctcgggcccattggaccctagagatctctgttgtagagtgaggtcctagacgcgatctcgtaactcacctcctggctctaagatacagtgagtcatgctttgatgtgatcactgcttgacaataccgtttgggtctgtgtgtctgagtgcgcgtttgggcaggtacaggccagaggtcagctctgggcactgtcctcaatttctctccaccttattgtttcagactcggcttctcactcaacctgacgctctctgcgcctgttaggttagctggatgacagtcccagggatccccctgcctctacctccccagtgctgggattatagatgcacactgctcatgacccttttacatgttacaaaatcaggggcttgtgcttgtctgccttgcagtttactgctgagccatccccagggtttgttttttgttgagatctctgtcgacttactaaatgttcccctgaatctgggacttacaggagagataaaaggataaagctcctggaaacacacatctggcaacagatttaaagatgattaaatctgtgattacttctgatccatataatagttcagagatgtgagtgtggtaaggcccaaatgcagagaaaaaaacaaaaaaaccaaagacacatacatgagcacaggaagttgagtggtgctgttcagtagctggtaccccacccagtccatcacctcaaccgtacaatagcctcaggcagtttctggggatacagaatcccccacctccctagcaaaggtaagaaaacgtcagctcagttatttctcccaaggtcttacaccagtgtagagggggccattgtatttattgaatcaaaattcactaccagcccaatacagctctgtagtacagtccaacttcccagccatttgagcccagttcgaaaattaaaaataaaaaaaatccttaaatctgttgccagcatctttctgaaccagacctgaaaattccacttagttgtggctaccacagagggagttagacatcaggttttgctgggtagccgcatctaccctcctcccccccacacacacccatttttcataagtcaccctttcccagttgggacccctgtggggcagatcaggttgcattctggacacaaatgagcatgcgcagagctacagacacccctgagggtgtcatctgcatctgatgggggtgagaggacagtgaatgccttccggggccacccattcttgataaggaagcctaacagaactgcgtctgtggagaagagtgcagaacaggaaacatctggaattatgagttctgtttgtggtgggtgtgggtgcatcatttgccgcacctgacattgctaaagccttggtgtcataggagctttggatagagatggtcagtaagagccttctggggaaaaaaaaaaaaaaagacaggaattaaatatggagctctacgttaatgctgtcagaaccaaatgctggtagttctcttctcagcctgtcagtcaccacctgcccacctctcagctatgcttggaaacccaacctcctggcatggtcgagcatcgtttctgtcatcagaggataagggtgaatgaaggaagttatgggaagggaatgagtggtggaagaaggaattattgctaaatccaacccaacccaactcaacccaacaaagtaacttagtaatgaacctggttctagttctgaagctagactctcaaggttctaatctcaggtctcctgcttgcaaatgtgtaaacctagacaagctattctatgctgagcctctgcacccacctgtaaaacaggcacagtcccatagtcccacaggctaaacgctagctctggcctcatgtgaggagcaaggaaggctctaggctgaagagcagctgataatgtagactgtgcctatgaaacagacaggggacagatggagagagccaggagctgggagagaatggagatctgagggaatgaggctgtgtggggatggagaacaccaggagatactttctacctgctaggaagaagaattgcattcactccaaaaaggtactctggtcccctcacacccctgcctgtttccctctccgcagtaggctctgcagcacccttgcacactctgggacccagtcctccagatttgccatcacctggtgtccttggacaaagcaggcacggggttctgcctccctcccccaaatacccaccgagggatccctgtgagctgggtctcagtggcttcccatcgcctgtcagggaccaactgccagctagggaagaagactgagggaaggggtcactcagctgggttagctctggctgaggagaagctgcaagctcacctgttttctttcttctttcttctccaccccttcatgaacacacaagcttctgaagtgtgctagctgccaccgaccttcatctctgagagctgtagaaaacactggacctgcagaggttattagcagacagcgggagaatgacagagacttgagggttcctagtaagcttggtactgcaagggttaggccctgtacctgaatcctgatccatctcttctgcttctctgggcccctccacaagtgaaccttgagtggcttagtatgatgacatattaggatatttggtgcccaagacaatgacatggacttctaatattttcccctcagatttaaaagtttgtggtaaaacacacacaacataaaatttaccacattagccattttgggtgtacagttcagtggtattaagtacagtcgtttggttgagcaactgtctctaagcctcttttcatcttgtaaaactgaaaccatacatccaccaacctccagtgcccgccaactgccccacccccaactcccattctatgttctgtctctatgattttttgacttccctatgtatcttgtatgaacagaatcatacagtatttgaatgcttgaatgttttcttcttattttagcatattatccgtggggccctatcttgctttagtaggtgtcagaatcttcttttaaagactgaataatgtcccaggtgtatttacagatcccgtctggcttggtcacacaccaagtgatggacacctaggttgcttctacttggtattgtgaggaaagtgttctgagtgtgggcagacaggggtctgctttccagtctcttcagatgtgtactcggaagtaggattgggaggtcatgtagtagttgaacttgtgcaagaactggcaagctatcctccacagcgactataccagtttacatccctaccaggagcatctggcacagcagtttctctatatccttgccaacacttgcttctgatttcccatcctagctgctctcgctggggtgaagcgatctgaacttttgaacagaaagaaacaggcaaagtaaaggtttccccttcagtgccagcagcactcaggaggcagtcgcagtctcggggggggggggagtttcatgagttcaaggccatctggtctatatagtgaattgtaaaccaaccacgactgcacggtgagggtctgtcaaaaggaacgaagggacgaaggacctaaacctggcataccattttaacaaactaatcatattaacacatacaaaaatatagtaactgcgtatgcatggcccttcagagacaatgcaaaaggagggaagggagaagatgtgtagagaacaagataagaaaaattagaagttaaggtgggtaagaaaaattaaggtggcgcagaacggtgacaggctctgaggacagctttgcgacagcagttgggggcagcccaactctgagtgctggaccctgtttgcctacatttgcctggggaaactgactgcttccagggcaggagggtcctcaagagaaacaagccacagatcctatttggggtcagaagatcaaaatgggggaggggtgattggcccctaaaacaggtttgcctcagggagcagaaagcaggcttccttggtttcttggttggcctggctgccccttgtccctctgcagagctagcctctgtagaggccaaactgggtggcattcaatcttgggtttcatgcattttttaaacctgctgttgaaggagcaactgcatcaggcagcccttttatgtcagggaaaccgcctgtgagaacgggggaggtgatgggggcgctgagctccaaggggctgccctgggcctttgtttcaggaggccgcacaaggcggctgggcttttcctttgaaaacccctggccaggagctcaagagcctcttttctgcacaccagctacatcacattttacaaacctcaaggaaggggacccagacctggttctgtagtagtctggtttgtgtgcctcgagtctccgacaccctcattttcttggtaagcacagaatgtagggaatagcagtgttttctcttacatccctgcaaagatttccctggaatttcaccaccagctggatgaatagaaagaaaagggaagcaggcagactaaatagacggggcatctcaatggcatgtcaccgcctcacaaagccggcaggaaatccttaattaaccctgcttccagacacaaagcccccataacatttcatcccatttgaataaatatttttaaagaaaggaatgtgaaagcacttttattcgtggtcttggagcgctaatttagcaccacgtgtattttcaactgtcccacaaaagcgcagaggataagggagttcttccaaaagccctcctcccctcggtttcatttctagtccatggtgacacatccctcttgggaaaatcctggcccagattttattagtcttttgtcagctgtcgggagttaaaacttcacaaatccagtctacgcctcagccctgccttgcaagctgcctgcctccccatgagatgtgggctaatggttgggaagagtcaccctcatcgatcctggacacagcaatcagcccttccttccccccaacccagaaacctaccctgtgctcagtagcccctggcttccccgagctgctcctgaggcactgaaagcaggtgtgcacacgcagaggtgtttggtctcctctagcacaggtctgtggggtcttttttccaaaaggtttcaaaatcaccattatgtcgattgacagtgtttctgaccagctttagttgagcttccggctctcctccttggtccatgtgtgcttaataaaaccctgagactcttgctaagtcaatccagcaagaagctcacacttgacacctggtcacactcaatatctcagaatccaatgagccccgtcttccactgtccctcaggggtgcctcattttgtcttcagctgggatcctgtgacgtcagcttagccagaatctctctctcactcctgatatatctttcttagtaattttccatccactgacccctcctgcctgacgtcggactatacctgcccacctgcccttactgtggtcaagctgagccccactgctctttcccactgaggagcccaccaaagtggtcctttatctgtctaaatggcctgggtaaagtcactcttattgttcctcaacaagggtctctgagtaatttctctttaacgcatcctggcaatcattattaattgtttttactaagtatgatgataatctctgatagctatattctgaggtccattttataaagtgatctcattatgatgtcatttgcaccccatggaaatagtgactgtcctttcctcctgacagatcaggaaactgaggcactgagtgagcttcttaagagaacaaagcaaagattaatattatggacagagcacgtccgtcttttttaacaccccataggctgctccttctatgacatgctgtcttgtcgtggaaagattccatgatgtgccaacggaagaaaatgagtcagacccacctaaaagacggtgaccctgtggatttgagcttccacataaaattaatttgtactgagtggtggtggcgcacgtctttaatcccagcacttgggaggcagaggcaggtggatttctgagttcgaggccaacctggtctacagagtgagttcctggacagccagggctatacagagaaaccctgtctcgaaaaaaaagaaaaataaataaataaataaatagatagatagataaattaatttgcacccctgggcaagagcagcgggtctgggtcacagaccgaatgaggaacacccacccagaggaagggcctctggcttgtctggccgcttttccacggcaccacattctacgctgacaaacctggcggaagagggggatcccagtggtcagtgttagttagcatcagagtgctttcgtgggcatgtgtgtgggtgttgctgcgctgaccctcccagctgagagcaaggcttgcaagacaagaaaggatgtggtggcagagacaagccttctagcgtgggaaagtgatctgtgtgccattggtggcatgcctgccacatcataggctctgctgctgtgctctgtggtggtgctggccatggggggcggggcctgaggacacctgcgctcagacaagaagctggtcaaggggtggggcccgaggacacctctgctccagtcttcagttaatttttagttttcactttactgtattttcccacaagcaccctgagctgctcccccagagcaacccctctagccaccctatctcaggtgtgccatggtgcggaagtgacttgcctatgtcccgcggccccttttctgcttcggtagcggaatctcagggactcctccctagctgcagtgattcgggaaggtcctgtatttgaatctgatttcttatttgaacattgagggcactgggtgtaagaaccaaaagagtttcttgttctgtgatcagaatgtgtctccttctaccccaccggcttctctgtactgctcactggaccctaagcatgcctctgctctcactgtgtcttgagagcagagctgaggccgtttgtccctcagagcatgggtcagagggacagtgtagacggcagtgtgacatggaaggatgcttctagaaggtgcctcgtgtgtgtgacgccctctccagtcttccagtagctctggttataactgggctatgatacgtgggggctggagacagagctggtaagaagggtcctaaagctccaacctctttgtccaacctcattgccctaaccaccttagaagccatggcagatagagactgtccctagggtgcctgccagcagccgctgctgccagtcaatacagagttcacaggagaggcatgggcaggataagccgcttcccgtctgcctgtccactttgttctcattcagccacgttgagtcgtaagcattctcagctcgccaaatatttactgagcacacagtccttgtagcacccaggcagagtggagacaggcggagtctatccatcccatgatgggatatgctgctgctcttcccgaaggcttcctctttataccacaaggttcccctggagtctttagaagggtgtgcacacagtcgaaaaccccaaggcaagggtgagcgcagtggagtgtaaggagccagctgcttctgctccccatcgaggctgtggctccactcctcctcactacagggcaagcttaggttccacagttatatcctgggctcctcaaacacccaacacccaggttccaccaacttaagggataagtctagaagagtggtgggatgcacccaaatccctcagcctctggctgaaagaaaaatgctgtcccttctgatcttgcctataaggcctgagtctgtgacttgtctaacccctttttaattgttttccttacattcttttaaaacttcaaatccttctaatgggtgccagcttccacttgttctatgggggtgggggacaggtggaaggtgacagcccctccaggacctttggcccttgatcactactgcacgtggtccaggagctgaggcaggggcattgtggctatggcccccaaagacttgccacttgtgttttcatacagtaaagagggctgctgcctatggacgtggcttttggaatgtttgagccagaggctcccagaaccttgatcctaggttctgttctcctcaagggccaaggaatacagaaggaagcctcagagagtcaggcgaggcctcgctgtcctcaagattgagctcagagcagcctgcatagccacaagcagttctcagcagcagaagcaggaggaggagggcagatagatgggcacgtgtctgctcttcagagatcaaattgtctctgaaaggctaagcagcttccaaagaaaagatggaatcaaaggggtgtatggtccatgcctgtgcttatgccaagaaggatgtctgaactgtagctggtacccccaatggcttccagcagcccagcagcagcccagccctcctccctggcttctcacacaggcagcagaggcagagctgcagagctgtgagctgctcgctgcatgcagtctgggcagctcctgtcagaacgtgacctactatcactgagaccagcccagtggccaccactccttgtgtttctcagatagcggcttctgaagggaatttgtgtgggggaggggagagagagaagacagcgcctctcttggtctcagtgaatggcctcaaattctgatccaaagactgcaggactgatgagatggctcagaggggcagtctgacatcccgagttcaatccccaggacccacaaagtggaagggaaggttcattttctacaagttgtcctctgactgccacgggtgtgctgaggacgctcaggtctccacgcataggtatatttttaaataccattttaaaaagagcattacacaaaaatattgagttgtcaagggacaaacctgttgtgccttttactgttgcaggggacacggacctcactacacgctgggcgagtctctgcctactagctatgtgatcttgagcaagagacttagttgctctaaacctccctttctcagcagtaagacagggggaatgaggtctccctaagcaagctctgaggatgaaatgagacaaatgtttatgaccagagtgcagggggtggggtggggtgggggggtgggggggccacacaagacagggatgaatatcagcttccttgtgggaaaaacttgcacgagctttctaaagggtgtgaggacaataggtccttggtgggaaaataggaaggaaagggtggttacttttcgggtccccgagagacaccctgattgtctcactgactgccactacagtgcatgacctaataggccttgggacggtcatcttggacacaacccacagaagctccaattggattaaaaatctcagaaatggtgggaatcaggacctctcatctcagcttagcatctacccttgaggctaacttggacctagaggagtgggttccattagtaaaagaaaccatctcccatccttctcctttcccagggctgtgaagcgtaggtcctctagaagaggcacagattcctgggacctgagtccagacggattccttaaagtctttctctgcttgtctgtggatgcttggagacccaaccagcctccaagaggctgttgcctctcttgttctatctgggtttcctctggtgcagtgttcttcctcctagcttgtaaaggtcaacaagtggcccagctgcagaactcatgcttctagagagagcagaggctaaaacagacacgggaagaagggggaaaggaaacaggagtcaaagcagagtctgggaaccattctgagaggagagaagcccactcaggccattcttcagaagcaacattcaaaacaaacccaggagaatctaagacatggaaactttgaccgtagtggacttcagcccagcaatggggaatcctgttggggagaccaaccatgtgtgtgtgtgtgtgtgtgtgtgtgtgtgtgtgtgtgtgtgtgtgtaggtgtgcatacatgtgtgtactgccctgtgcctcagtgtttcctataaagaaagctaataggagtacatgacttgtctccataagacccaatagactgatgactgtaacatggcccccgttgcctttccctagggaagctggcatcatggtgccatttgacccacctggactatcacatatctatcaatttcttaagctcctgtgctcacagccgtttgtcttgtgaactttgtacctgtcaagtagcttccagttctaaaaaagaattaagacccttcacacaaactaatcggagcaatcgttctgcgttttttctttcactcttaacctcgcccaatgcgagttcaatgtctgcttactgaagtctcgctcttacctgacaaacagatttcccaaaacaaaaacttttgaaagcaaatgagtgaaaaccatttcagcagaggctttcgcttcacgtgcccatttgaaacagaggctgttcctaagctgtgtgtgctaactataaacatcaatgacctttgagcgtctcctagcagacagtggttctgatccagcagacgaggaattgggcctgagacagtattatacttaatctctctattagctttattgttgacttcaagttttatgtaactcttataagttacaggtgatttttttcatatcccaagaatgtacaagacctcagactggggagatggctcagtgcacaaagcgcttgtcactcaagccaaacccgagtttggcttccagaacccatatgcagaccagacaccgtagcataagcatccggtatcccaacgtgctcatacagaaagacagaaggcaacaagaggcccatgggccagccagctagcatggtgtatgtagcagagatcctgtctcaaaaaacaaggtgaaggctgagaacagatacccaaggacagcatctgactttcctgcacatagcatgatacagacacacacacacacacacacacacacacacacacaccttcactcaaagcaaagcaattatagacgaccatagaccagatgaatgtctcataaccagataatttcaataacaaaattataaaaatactctcatctttttaaatagctaaataactgtcttctgtgggtggaacgtgtatcttcatatttatttaatgcagaatggctggaagactcgaaaggctaaaaggtcctgctaaaactgtcttctgaaatatcctcattggttttgaactgaccgaggaggatagcccacagtggccgctgttcacctgcttcagccggtgtaagaactcccgagctgggcttatgtggcttgataagatccagtattggctgttcagctggaagagcatgatggaagcccctatgtcagggaacagggtaggaagagggtgctcccagacttgtagcagcatcaggtggtcacattcctttgtatggatcccagcatgggcctatattaactgggctatcgttcaacaacttgattctcagagcagcatgaggaagctgtgtttcctttgcctctgagcaaatggtgtcttaacaatgaggcactgacaaatctgtcttcactggtggttctactgccctttaggcatctcctgagtgttcctttgcggttcttggcttctgcaaaccttggggctaggacatcagaccttataaatgggcatggagtgacaacagtgtggatggagcatggggtgacaacagtctagatggagatgtctatggactctgaacatggcttcagtgccaaactagatattttgggttgagacgtgagttacaagacagaagttgaaaatgcagtcaagaaaatcagtcccagatgaaagaggcaaggctcagcaccatgaaaaatgaatgacagccatgccaagttctccgcttcaggtgaagagtggacatttgcaggagggccagtgatgggggtagaagagatagccttgactctgagggacactgactgagggaatggtgacattctaagtagtggaccaaaaaggtctaagaatggagagggcaagtatcactgagttcccagagaagtagacatggctggcaggaggggacattaacagctgacatagtggaaaatagtctaaccatagtgagaggccctgaagccacacagtggggtgggggtagatattcaatgtatgcaaaaccaaacctgtgtgcctgggtggtttgagcccagggagagacacagccaccaccagaccgagctgtgcagtgaatgcaggtagaagtgtcccatcagataatgtcaccgatgtgtggtcacagcatcatgagtgtggaagcaaggctggcaggtatctggatgcttctggctaatctagatcgaccacctttgctttttagtttaatttttatttccagttagccccaccataccgcacacttccattctcaaaacaataaacagagttcagaaaaattctaaaatgccaaagagaatacagaaacaaaccatccatcaccagggtaaccacggctgccaaagtcacctagctcatttcagagtttatttttatatactgctttaaaaacaaaccaaacatggttggaattcgcagtccaaccagtcaataaccatgcgggatgaacattctcacagccaggatggcttaaacctttttagtaactggaggacattttaaggtagactttacctgtttgaaatagacaacacattaaagaccttttaaactgaacaaacaaacaaacaaacaaacaaacaatttttcacttatgaagaaataaatcaagaaaacattcaatatgaaaaactaaaaaattaggtctctttaatcttattgtctgggagtcactagctctgacagtttggatattatcttccacaataatgctcattttgagaaaagaagaaggaggccagtggcacctctatacagtagcaacctctccgtagtctgagctgggaggatctctgtgagtctcctgggtttggggtccgcctgggaatatagtgagaactcacctcaaaaaataagcaaatgaaaatagaaaccaggggctggagagatggctcggtggctcgaagctcttgttcttccagaggacctgagtttggtttccagttcacatagagggtaggtcacaaccacctgtaactccagccccaggggatctgctgctccctctggtcaatgtgggcgcacacgcacacatggcagaccccccttccccactccccacatatacataattttttaaaaaaacctttaaaaactaaaaccaaaatcagagtcacagaatatgccatttggatcttgctacttttgactactaaaccatagaagtttctgttttctcactgtggtgtgtctgatattaatctaacatgtattgattagatagccccagccgagccattcaaagcatttgacattatattcattcatttgatccccacaacaacctatccacaaaagtgccgtgttttttcttcttttcacagatagagtaagaaaggggcaaggtggggcttgcaggcaggccttccttctgactctgggtctgccctcctctgtgtatttctgcctgctctttgtggtgtttctttccatttccagctctgttccaggggtccccacacaccttgtggatgcccctcccccatcacacatatacacacatgctcatgcgcataacacacccaacacataagcccaatctcttctttcatgagaagtctttcaaatatgtaaccattttttgaaatctccaagtccttaggctttacatccagtctttagggtacaaagaccctctccatgttggcctcttgagcaggtatgattgtttttaatgtgggtagctagatataaatgcatggcccaggttgttgaagctggtcctatatcatgtttaccagaccgtaggtacctgtcaggactggcttttccatgagctgtgctagaatgcttttatcacatcctcttgtccccagagctccatggctgatcctgcaaggcacagccagggaggggagaacttaggagtgtccagagaccatagctggtgnnnnnnnnnnnnnnnnnnnnnnnnnnnnnnnnnnnnnnnnnnnnnnnnnnnnnnnnnnnnnnnnnnnnnnnnnnnnnnnnnnnnnnnnnnnnnnnnnnnnnnnnnnnnnnnnnnnnnnnnnnnnnnnnnnnnnnnnnnnnnnnnnnnnnnnnnnnnnnnnnnnnnnnnnnnnnnnnnnnnnnnnnnnnnnnnnnnnnnnnnnnnnnnnnnnnnnnnnnnnnnnnnnnnnnnnnnnnnnnnnnnnnnnnnnnnnnnnnnnnnnnnnnnnnnnnnnnnnnnnnnnnnnnnnnnnnnnnnnnnnnnnnnnnnnnnnnnnnnnnnnnnnnnnnnnnnnnnnnnnnnnnnnnnnnnnnnnnnnnnnnnnnnnnnnnnnnnnnnnnnnnnnnnnnnnnnnnnnnnnnnnnnnnnnnnnnnnnnnnnnnnnnnnnnnnnnnnnnnnnnnnnacacacacacacacacacacacacacacacaccacaccaccacacagagtttcatacgaagtcgttagcagagggcatatcactcaagataatttccatttgtgaagagacactggaagaccaccgagcacagtacctccatccaaaggtattttcagctggggaagtgtcctctctatgtcgcctgatgtcacgttctcttgtattatgatcattgactctagccctctggaaatataagctcccaactcaaagctttttttcataaatggctgtggtgatggggcctcttcaaggcattagaaaagaaactaagatagatggattcacagacagcatgctattttatcctgacaacaccctgtgaattgggtgttattgcttccagttgagaagtggggctaaacactgctgatagagggcgcagagctcagggagggttgagagggcacacaggggaccagatctttctcaggtgcttcagagggacagcagaagccagagcatcagagccaggccatcaggctggtcactcgtacctcaggggcagtgacaggtccctggaaaagctcagtctagatagttcagcaaccatgtttagcttctaaacttatcacctaaaaggaaggaacccaggtcaaccttctagggtaacttcctttgtttgagaaatgaaagtaggaaaatacctaataaaaaatattaaaaaagaaaaaaaaagtggggggggagggtatgggagacttttgggatagctttggaaatgtaaatgaggaaaatacctaataaaaatattaaaaaagaaaaaaaagaaatgaaagtagggctagagagatggttcagtggttaagagcactgactgacttccagaggtcttgagttcagttcccagcaaccacatggtggctcacaaccatctgtaatgggatccgataccctcttccaatgtgtctgaagacagctacggtgtactcatatacataaaataaacagttctttagtagcatctttgttgtccttattaaaaagaaaaagaaaaccactgtagtgtgtgtgttgctaaaaaaaaccacactaatgtaatatgttgtaagtagaatcccgaactaggttccagactccggggtttcctacatgccaagtcaggccactcaccccagagagagcaaatgaaggcaggaaggagcttacagtggtcttctgaagcaagacagaaaccaagcatctcagcctgtcttcagaggagcaacaggatcttcacatttgaacggagggagaattccatacacaattaggcagtcttggagaggattgctgtcacagctctggttctgcaaggtaacctcagagaagtccttgtcaagggaacaagccaagtgccattgctcctgcttagtcctgacctcattctggggtgaccagtctgtggggcttctctgttcctgaaatccaaggtgagtgaaggcttaggacaatggctggagactctcggatgcttttaggggtctggagcgagttataaaagctgacaggaggatgcctctgttactgttgcatttgtgtcttcagccccaagcagggatagctagacaggtatcactgatctttgggagatattccttaaacaattagcatgcctgtgtgcagaagttagtcaggaatcaggccctaagtgaaggacagataaaaagtgaagatggagatctcacagctcatcctgctttttgttgccctgcaggcccaagggaggagttggtgctttttttagcaagaagattcaaaacacctgttacaataacaagttttgttttgtttttgctttttgagataggctcttgctaggtagcccaggctagcctcctgcctcagactcctgagtgctgggattacagtcatatgccacacatctagcaaagtttctttttaaaaagcatgctacagccgggcagtggtggtgcacacctttaatcccagcacttgggaggcagaggcagctggatttctgagtttgaggccagcctggtctacagagtgggttccaggatagccagggctatacagagaaactctgtctctaaaaacaaaaacaaaaacaaaaaagcatgccacaacaccattgtcccacatacagaatttacaatagtttcttcagatcatcaaatgtctacttgatggtcagatgatttttccaaccatcttattcttgtctcttcttaccttaccattcgtttggcccagctgacatatatttttctttgactcttgaatatctaggctccttcctgcaccactcacccacttggcttcccctttgttgagctgtattcatggaggaagccaagttgttaatcccacagagtttcccacagtctgcatttcactgggtgcacacctgagctgttatttaactcattccttctttcccccttgcacatacacatggagtcttgaaacgactcaggtttgctgctggagcaaggatgctagaaagtggtactcttctcctgaggcttacggcacatcacacgtgttttcttgtgatgataagagccaatgacaaccattgcatagaggggctatctcattaggaataagctatgttttcatttgggggtagaaatgttccctccttacctgtttggctgccctgatacatgctcagggtaaacgctagattcctttcctttatctacaatgacttgcttatataaaatggattcaaaactaatgctgggcagagggctctgttgtgtgagtgtggacaagagtagtcatccaccgctcattcttgatactcagcggtggctgtaactgtacttgtacaattatagtgttgtataattatattgtacaacaattgtattgttgtccttgtgcatttgtttaatagttttacaatttgagtgatggttgacagggaaatcttaagcaagcaaacaaaaatgttccccatcaccctcagaggtgaagtttcagggtcatgatgaatgtgtggacttaaatatacctacatcacttaatatactacacacagttcctcatcttattgatgtgtgagttgttccaacattggctactgaaaaattccaaattgtacatgtgtgctggaggggtccacctatggggacatatgtgcatgcttgtaagtgtgaaggccaaatgacaaccttaagtatcctccagttagcatccacctgtcctttctgagcctcttactggcctggaactaatgaaatacactggctgactaaccagcaaggcccagggatccacctgactccaccaccgcagagacaggattaagggtatgtgccaccaggccaggcttttatatgtgggtcttggagattgagcccagtccctcatgcttgcagtacaaggcctttgctgactgagctgtctccctttcctcttctccctatcaccctctcattgttctagcacaactctagaagtgtttgtgagcatctgtgcactcgcatgatgtggctatgccatgcctgttgagcatttcccactccagtgtgggcttggccaatcctccaaggcctggctgttgtcttcacaaaggttctctgtgtgcaggactctcattactccttctaggcccctgctacctggaaatatccttgagactccagttaggtgtggtgaccaggagcagaatttttctctccacatagcaagcaaatattcctttgccaccctccacccccactaccaccacacgccacctcaaccaagcaggtgtgccaggatgcgttggttgtaccggtgggtgggtggagggaaaggagattagaatctaactataaaggctcaggcagtcactagtttgagactggctccccttccccagcccgagccctgcccatagccacggtgtcagtacagagagggcagtgagtgtttatatctccatctatctagaatgaggcaggtttatctcacaaactaaatcagaaagaaacttttaggaagggagcaataggctatctccggttcctacagctctgtctaatcagccgggggtagggtgggctgcacagtgcaggtagagatcctgagagataagcacaggctgaaagagagatagaaaggaactgcccagattaaatgggtacagctggcgaggccacacagacttgggagtcctgggtcccctctaccacactacatacacatccgcatcccctccgagtcaagagtcacctattctgcaagaagactgtgtatgtctagtcagcatatgaggaacttcttcttgaacattcttgaacattctagactttgcagagcacacacacacacacacacacacgcacccgcaagggaaacagccccacatgttgccactgggtgactttgcttgtcatcatgaggatgggcgagaaccatgcttgttctcagaacagtgtccaagtccaggctgtagctgttctcaggaggaagtggacagacaggcctagaaaggaggagtcagaaggggaagggaggcaatggaggtgctggggcatctggtcaccacccggaggtgggaggagaaaagctaatgaggtgttcagggaaaggctttataattgatcttctggtatactgcagaggagatgcctgtgtgtaagggatagagaaaccagtggtatcagatgcctaaggagcagatgttggtcacccctctgtatatacacatgcatgtatgtatgtgtgtatgtatgtatgtatgtatgtatgtatgtatgtatacacctggggaaggtgactcaaccagaacagcatgggctgtgggaaaccaagactcagagcagagggacccatgtgtgggcaggtggcacagatctgaaccaaggcacagtgaatccttttaaaggcatgcaagtcgctgggtcatgaggctgttgagtcaggcacttatggtgggtaaggggtcacacagacatgcaacaattgtctttctcaagagtttatagggattggggtacttcaatgggagcgtgtgcgtctcgtcttgggttcaatccccggcaccagtaagcaaaccgtcctctcaaaccacttatacaaattacacctatgttataaatactgtatgtgacctatgttgtaccacacatctataacctgatgtttttacaatcacatttaaaggtgtatgcatgcgcatgtgcacacgtgcctgctcacacacatgaatgtgccattggcatggatgcggaagtcagagcacaacttgcaggaactggtttctgtccttttaccatgagggtcctgggtcccaaacccaggtcttcaggcttggtggcaagcattcttacccactgagctaacttgccagtgccttaatgacatctttgacaatgccagaccacacggatgccactggaatcatacaattatactaccgagagatgctgttgcgaccttatctatgacattcccctaaggttgaaatcattgaacaatgcatttttcagaattagccctgtggtgtgtcacatgactgccctgtggtgtgtcacatgactgccctgtggtatgtcacatgactgtctacacatttaaacctgatgcctttgctcccatggttttatttctttaaagaaaccgagtgatacacaaggtccaggaaaccaattttatcagaagccccctggcatcctccctgagccagctgtgggatggcaggcctgctgccttacgcctggcagtcttgacttttgaattttactgtatttaaatagacaaggaaggtccttctggctagacttgcttttctcgtgtcctacagtctgtgcacgtgtgtgcgcatgcatgtgtatgtgcacacacgtgtatttacacgcacaaattcacttaacaagagataacctgggctcctgccaagacagctctctaacttttgtttcgggacaggggaatctttgaaacaagtgttcccaagaaaacgtaagtgaacacatctttgatctcaaaatgaggaaagattttctaagcctacaggtagaggtagagggggaaaaaagaatctcctaaattacaatttgcatgtatcaaagataccaactgaaagatagaggtaaagagagaccatcttaatatatgtacaacaatccctaatatgatgggaagagacgaatagtgccaagcatgtgcaaacgtccatccaggaagaataagcaaagctcatggccgtcagattcataaagtgacaactgcacagcaaagaacgcgtgaaaaaattctccagcattattggtaagccgatgcccattcagggttagatgctgtgcttgctcactggataggctgtattactttgttgtttgtttaaagatactacccagggttagaaaaaatatcataaaccaggttccttcaaaaactgctctatgtacattggcttcatttaaggggtctgaaaagcatttccccaacttgtagctacatgatttcgtgactcttaacttgctcttttttttttttaagtttttagaaattgttttatgtgtgcgaatgttttgtctgcatctgtctgcgttcctgcaccacatgcattcctggtgctcacagggtgcttgggaggtcagaggaggacagtgcatttacttgttagtggatttagagatggttgtaagttaaccgtgggtgctgggactccatcttgaatcctctgcagaaacaagtgctcttaagtgccgagtcctctctccagccctgttaatttatttttaccaaatagggggctggggcataacccagtggtgagctagcaaaataaggccttaagtttaattctcagcaatgtaggggcagaaaaaaaatcacagagagaacactgtattcaaggatgtttactgtaacacaataggactaaaaatccatttctaaaggcacagggtgactatacaacaatatctccagacagtaaagagcagaacctgtgaggatgtggtcccaatctctaaaaatacattaaagcgaaattagaagaaagtatcaaaatgttaattaacagtgaccacatttgaatggtgaggtcatgggtagactttagtttcttttttgcactttccagtattttacaatgttcctataatcggtactttttaattccattatcagaaatgctatatagagaaaacattgaattccccccaattttgaattaagaaatcaaattcttcctagtatattccaagaagcaagtttggtggtgggggtggggaggagatgctaaagagaaggcaaaggcgtccgtctgatagagttagagatgtcttcgtttgtgtgtgaacactctgcagcctccattctgtctaagtggatggtccagcctggatttccggggagagccatcgctgcagatatgaagactaaggtcaacagcacacagtaggtattataaagccctgaggatgagtgattgagatcccaaaaggagtacgtgtaagtaggtgagaaaataggatgagaaatgagctctcaagtatctctccaagcagtttggcagaggcagagccagcagttggggagatggcgcggtatggtccaccgtctcagccacaggcactgggcaaacattctggagtgttcatcagatcaaatgaactctgaggattacttagtctaagatcttagattttggacatgggtatttgccttcatctagccaacttctttcgggcctagttctcatgggtaatatgcgtgtgcgcatgtgtgcacatgtgcatgagggtccacattgttcttggtgttaaaaagccatgtcaatataacacaaatgatggggaaatgcagattcaatgtttgagaactgcttgtgagtgtgttaactctctaacattcacaatgaccacactgggaaggagagtgctaagaggcaggtgtctgaacccccccaccctccaccccacccccaccccgaattctccttgatgaaccgccttagctggatcttgtatccgaagaatcagatgagtttccttttttttttttttttaaatttgggatctttttttatttttatacacatgacaagattttacaccaatagtcagttaaatagtacaaatttacattcaggaggaatgtttaaaaaaaattcaacaacaacaacaaaaaaaaaaaaacacttcttcctgtgacccataatcgcaacattttacagtgcaggggagaaggaggcttggggcagcatccaaaacaagtccgtcttctggttgtggtcatgagccttgcaggcgctcagttcagcttggccacgtttgcttaaatggactcagccccacaattgagtaaagctatctcgtggattcctttttgtcttggttgttgattgtggctccaaggattgaacctagaatcttccatgtgccagggaagcaccgtaccactgagcacaccacagcccctccatttgtgaagatctatttcaggatcagatcccagtttttcagctatactcccgtgtgctgcgtagcagttgcctcttctttagggttggaacccaggccctccttcccttatgaagaaagagagcacctgcttcatactttggggagcaggggctacttgactgtggttgaactctcacagctagagattttaattacaatttcagagaaggcacaacttagtacggacagggtggaaaagaaaagtgagtgtcccttggcctaagcttcccttattgggaggaagacacggaggttagtgagactttgttctatggggctggaccagggtggtggggctcactaggaatccagagtgcactgaccgaggctgagcttgagcctgcctgcctagggctcttggctcccgaggaggctggctttgaggtctgcacattacactgatagatggctgctccgtgcctgggagaggtgttttggctcaatgtcagggctcccatcagaggagcctgagctccaaggggtttgaaaaatggcttagatgaaaaaatggactctgttcaataataaattataatgatggtttgtatttatagggcatcctcatgactgagggagttctaagttctttatggatattaacccacccttcccgcaatagagaaaagataattttatcaattcaatatcttttgaatctcctctctctccctgctcctgccgtaagaggatagctattacagcgatgttttcttgtattaatttggaggccataaatcttcctttcattttttttttctctgctggaatttttttttcttattggatatcacacaaggaattaaaaatgaacagcagtacctaaaatgtgtgtgtatgtgcatttatatgtcaccctgcgtgtagtatctacataaatatttaatctttatgggctcgggcttctctctcagttttcatgagctggaatttattatctactgaaccaaggagctattattatttgcttttgcacctaaatgatttaaaagtcaattataaattggctaagggaatttgagagccgcagcatgtactatggctcctatacttcgatttgtcaccaaatgtctagaatgaggaagtgtctacggtgggaaagagtctaacagagagccacgccgatattaaactgaccagacagtggccccaggtcactggaatatgagccactctgctgggtttcatttgggtgagttagggagctgaggaggtgatggtggggttacacactcagacaaacaactctgaccccaaagcaggaccccaggacaacccaaaacaacccctcaaaagcaggctagctccaggaagagcagtgggagggaccagctgggactgccaggtctgagcgatgcaactctctcataacaattagagccagcatcagcctgcttcccagtcccctgggaagacgtgtaaacactgaatgcattttctatttatctgagccgtgcaggctggaaggtggtaataaccattacaacagaattatctactgaacggagaccgcctctatggaattcacgtcctccgaccgaccgctcgaatcctctgggaggttttcgagtagcaaaggaacagggcagaaggccacctggagcactaggagggttttaggctttgtgtttgtacgaaaggctggaaaaaaaaaaggagttgatgttaacctcggaattagccaggagcgaatggtaaatctttgttaacaagctcggagccctcaataaattttttaaagtgagagtgcacaatgagcgtttgtaataaatcctcagtcgcctgtgggttctggtttggagctgaaaagtacttctggaacaagagccggcttctcggatgcctttgcacgtttaccgactaatcaaagtgtccagcggtttggcttgtgtggcggttattaccaatctaacactgtgagaactgaaatggctacaaagcatatcttatacacacatgcacacatgtacgtgtgtgcatacatgtgtgtgtgttgtttacttatatatttgagtctgtgtatatggatctgcgtacatatccacaaacacttgcaagcacatccgtatgtgctttcccttgtcaatgtaactggatttattttttttttccttgaaatgttttgatcatgttgtcccttctcctcccccaactcctcctggacgcccccacctccccaacctacccacctttatcttcttttctctctccttctctctttcagaaacaatacaatataatacaatacaaaataaaagccaagcccaccataacacagatcaaaagaaataagcaaaagtccaataagacaaaaaaaaatgccaagatgaaacaacaagtttacagataaaacaaaacatggagttagtttcatgttggccaactaggcatgaggtctgctcaggagtgtagtggcacgccactgtagccagcaggtatcaattgcacataccttcttgattaagcgtgggacccctggtctacttctctctcattgttgggaccccctctggtttgaacctgtgcaggtcttgggtacactgtcacagtctctgaattcatctgtgcatcagtcctgttatgtctagaggacaataatgaaactaggttaaaccttatattctatatttggaaggctcctaaaattttaaaaatggacacagaagagccatatatcaaaatggtaatttctttgacaaaattggttccaaattctaatactggagaaaaaaacaacaaacaaaaaaaccaaaccaatcaaacaaacaaacaaaaagcacctggtcgtggtggtgcacacctttagtaccagctctctggaggcagaggcaggcagatctctgagttcaaggccagcctagactacacaatgagttccaggacctcgaaaactacacagagaaaccctgtctcaaaaaacaaagaaacatacacacacacagagttaagccagagcaacgagtacttgctgtgtgcaagcttgccagacagagttccatccccagaccgacataatggtgggcgcagagaatgaattccacaacgttgtcctctgtgctccatgcttggagcacaggatgcatggcatgcatgccccaacacatcacacacagtttcaaacaaaacaaagtagaacatagaaatggaattaaaactcaaacctatctagtacctggggttgatctaaaggaagctgattgctccctaaagtgggccacagttaactctggctggtagaaaagcgctcttgggggaggcaccggcttcaggtaacttgcttggtttctggtctcctaagtccctggttggtaaccggaatgagatctatgctgggccgcaaacgccaaacctgcaaccccaacccccgatgaagttaattaagtctgagtcttggtctccacagcaagttgatgccagaataaatccagtgtgttgtcagcaggctgagccaggagcacagagctacagaaaggaatttctatgcaataaatatcacttaaattcctctcaaagttggagctggtgtcaaagtccaaaaaagcaatattccctggcaactgctggcagaagtgtgcgtgtgtatctggccatgtatcatctcagcactcgaattagcggaggagagagatagtgagttaatatcgcccagctggctgctcagagaatggctgtaactggagccagagaaattccaagagggcacggccagtcatcaatgacctccaaacgactagatgctcagaatttcctggcagcctgggctagataaataactccagctgctctgcaataaatgggttcccccaaatgtctcagggaagccagttctttctcttgctggttattgagcctaagaaatactagaggtgaaggaaagagagtggggacacctctgagccatcactatccacttcatctgtggtttgtttctaaggggacagccacctgaggtgggctgtcgtggtgaggcacgtgtgggtcttgtagacatctcattctgctctcagacagacaggtcttcggaaggaaaaaggtggggaggaaggaaatgtggggatgaagagcttgagagcgagagaaagagaagaagagagagtagagttaataaaaagagaccaaagatggcaggtgaggagggatgggcatggtctgtgtcacagaacacactgtgtataaacactggaatctttccggtaaatgtcctatccctctcccatctcgtttttatttcattttattattagaaattttgcctctgaaacaaaggcgatggaggttttgcatccttgctgtcaccctctggtcccaggtgtcccctagcaagaatgagctcaggcaaacctcctctctcctccttttattcaatctgcttgctcagcttttttgctctcagaaaagcagtgggagtagagaaagagaaaaatggctttggggatttgagagtctgcacccttatccaaggcaggggacagctagccccatggccaaagagctgcatctgttgcagaagggtcctcctgggctgtctgagcctctctggggaaagcagccttacggtcagagtacaactgaatttgtcctcccctggagaggagcaaggctttgcagagcccatgtacagcggggaggtggcctccgcatttggagcaaagtgtttgtaaaaagcctgccagaaacgcaggctgcggagataaacaagctccctcaaagacaaccccaaccacagcttagcattcagccaacaacatggcaatccccggggtgactgtagttcaaggggagtgacatctgcttggggaaaattataaacttgttatttccatttataaatcaggctcctcccgggaaaggaccttgaaaacagcttgtattatcatcgcccactgaaaagacaattgctactggccacagatggcacatctgcagaaatactgtgtctgaagctcttaggattgaaggcatgtgtcttattagccagcactggaattgctggaggtgtttttgttttctcaagtaatgagaaagccatctccaggagtgtaagcttctcgtgtcagcaaacaaaagtgttaaaaacaaatggctggctgtggtgactcccactcgtgatcccaggcaagaggatacagtagttcaaagccagtctgagctactgagtgaagtcttgtctcaaaacaaaccagccaaataaaaagtcccttttttcagtatttttggccctcctcctgtaaatgcatagaggcccagtactcacagaaaagggcaaatttgttagctaatgaagcactggttttaatcaagcagtaagaggttatttctattaatctaatagattcaggggataaccttatgtagatttggatccaactctaaatagttatttattgtacatctacgggtattttgccagcatgcatgtctgtgtatcacatacaaaaaaggacccaaggcagccagaagtaggtgttgggagcccctgtgaactggagtaacaaaacaaagggctgtgagccacaatgtgggtgccagacttgaacctgggtcctctgcaagaacagtcagtgctcgtaactgctgagcaatctatctccctattcggttgttttgatgaggtctgtttttttttttttttttttttttttttaataaaaactgctaaaagttccatttcgatctctaaaataatggctcattgaatttcacattcaactaataaataagcacaaatcagttcaggttccaagtaattaggaccaagaaaaatgagaaacaagtcataaactcagatacagttgactaactcatctaatgctcctttagtttttacaaatgtgtgaatatgcattatcttccatctccccatttcctttttgttccttttttttttttcttttttatagacgactttccgaggtccctggtactctatatgaagggctttggacatttgaagtcagattggaggcaggaatgagggagagtaattgggagctgtgtggggtttttgtttgcttggttgcttggttggttggtttttttggaacagggtttctctatgtagcaatgttggctgtcctggaactccatcaggctggccttgaattcagagatttgcctacttgtgcctctgagagctggggttaccacgcccgcctggtatgttcattttaaagggcagtgaatgtgactgtgggcttctgcatttgttgcctccatctgattggggagtcagaaagctttgccaaccccaaatccctgcagacccgatggcaatctacttgcagcagatcaagtagtatgaccttctaggccaaacagccaaatggaccgcatgtaacatttgtcaagatggcccatggccatctgtcccccaggaagctgatcactcaaaaggattggttcccccatcctcatggtcagggctgccaggtggcaagatgtccaaggctatcagaggggattagttgtatcacttctggcagtgaccattttgtcgaatggaattaaagaagcaagagtagatgaaagaggaaaaaatacgattggggaggggggggaaacacagagaggagacaacagggagaaaaatctggagggaaaaagcaggtaggcctgaagacacgatggcccaggagaggaaaggaggtgaacacggaaacataccagccctgcaggaagggaaggcagacctttacagaagttgggaatcagtttggcctcttctttgctggtccattcttctgacatcataggcagaacctaggtcagggaagcagcgccaaggacactagagcaaagactgtatccccaagcaggagctgacatgtctaccaggggctgacatgtctaccagcaggggctcaaagacaaggaaggggctgattcccaagctgggactgcccggctgggcccaggctgtttgaggaggagttcgcaatgctgactggggatttcagaacagccataaactggacttagaccttgtcctgggaagtaaaaagagaacgtcaagatctgagggagtaagacacatcagcctctgcaccatcagcctctccaccatcagcttctgcaccatcatcagcctctgcaccatcagcctctgcaccatcatcagcctctgcaccatcagcctctgcagccacttgggcatgaggagaaccctgtggccagaggacctggggtctgtctgtgtacgttaggtatttgaccagcttggctgacctccaagacccttgtaactttaccctcctaatttttcagcttcctgcattcatgggtgaattggtcagaaccaacctttcacttcagcatcccatcagcagtcctttttgctgcagcccgccgtgagtgtgtgtgtgtgtgtgtgtgtgtgtgtgtgtgtgaatgtactgtaatttaagtagtcaaagacctaatgttaactgagaattgatagagctggaggttagtggaggaaggtctgattagtgagaggtgtaaagtgactttttttctctcatttcaaaattatgtatttgtatgcactgtagaagctgggtaataagagacggcaaagaacaaccagataacccatattttcacgagccagagctgaaagcaccgttagtgtttgagggattttgttttgttttgtttttccgtagaaaatgttacatagatttggactcggcagaaatagctctaagatgcagcccatggctctcatgggtctctggccatcctggtgagatgtcctggagacgtcctggactctccaagagcaccccaggttgatcagtgtggcttgccctaggctggccaacctaccctgagccaggctgggtgtggcggccagcagggtgccctccatctcagggacagagcagccacaaaggtccgcccaccacctcccctacccgcaagcaatccgctccctgtgagtcctcatcgtggcggctgcaggcgcggagggctttgcgggcctttgatccacgcgaagtacgtcacaggcgggtgctagccgggcgtgggctgggcacccgagggttgccagactgacaaacacacctccaggaaaggattgagaagtcgcgcggctcggacagcctcactcaccctagcatccccaggctgggaaatgcgagtgctttgtgccccagcaaagcggcccggccttctgaagtcagaaaaaagtcaccgcaggcggcaggactaagggaaaaactgggtctcttttctacaccgtgctgtgcaccgggcatatttttctgaagctgcatttctcttcgtcttgtcaaacgtttttgggaagtccgggcacagagagctgatagcacaggaaggatgggagtcgtcgcaatgggctcagccccaaagcaaggatacaggtataaagcacaggaggtctcacactactatggccccccacagcacactggctcttagtgacagaaagtaaataaaaggtctccgaccttgcagagttctcaggggtttgttgttgttgtgttgtgttttgttttgttttgttttgtttaaaaaacaagggagccttctcttcaaatcattagtgaaaaatgggcccggaacagcagagtgtcagaaaaaatttaaaaatgtgaccaaacttatttttaaaatggagcttggcacacaagaggttttgggctcattgctttagcacggaaaatcgacgaacagaacactagctacatttggaataacaggccccataggtcttccttaaccctccagacaccttctcagaccctctaaccttaaaacgatggacacaattgttactatggaacaaccaaactaaaccaaccaaccaaccaaacaaacaaacaaacaaaacctaaaaattacaggcctttcataagaaatggacatataatggaggatatatatacatatatatatatatggatacatatgtgtatatatgtatatatatatatatatatacctgttttgatacgatcaccaattctatccatttctacagtttaaatttgaatatcttatttgaaagtaatcttgtatattttgttttgagtcaggccagactcaactgcaggacgccagtattcttcctgcctctgctcctgagttgctgggtctgcaggtgcacagcggccagccagctaaactgttatcctgtttaacagtaaatttacccccaggacttctgacttctaggtcaccctgtagaatagaaacagatccccactaaaacccatcctgcttgaacacagcacagcaatgcgtcgagagcgggtgacgtttgtgctgaatattgaaagatgagggttttggcaagctaagaacggttggctgatcttccctggaaggctggcagctccttccagatgaactctggggttgcttttttgattaaccatcagaaggatgctgccccaacaggacctgggcctgtgtcaaaagcagggcagaggcatgatcacagcctgggtctgacctgggaaaacaggaccggtcaatcttccttaggactagaacggacaagctcagagtgtcaagcccctgacaaagcctgcaactcctggatcaaagcggaaagtgaagggcagtttgggaatctgacactctgtaaccacaagcaatcgtaagcaatttttctcctgatgattagctttgaacctgggatcccagagctggacccaacaggagtgaaccagagaagttactaggttaacaacttatttaggagtaaaaaaaaaaaacagggggaaataactttacaaaggtcacacactttgagtgttagctttggccaaagctcccacatggtggtggtggtgggggtgtagaggtggagtggggtgggagtgggagggacaggtttgctcttctcacacaatggctctttgaaatgtaagccacaaggttcctttattttatagcactaatgacctttagccaatcaatcagtctcctaattatctaagcaattatgttattcatgaggtggggggaggggctgcctaaaacctggcttcccaccaggtagagaggaaagaattaacaacggggtttgtcctgggcaacatggagtttgttgagcagtgtagaatacctggttctttgcactgagaatagaacatggatacttttgaggttggtgtaggctggagtttctgggggagggatcctcagtggaactggaaagctgagaaaggctgtaaaagcttggggtttggtggacacaggcaggatctgtggagagcactagggccagcactcaagagctcctgccttcaccacaaagcagggcctttcctgggttgttagataccttggggtttgctctcagtccttaaatcagctgggtctaggcagggggaaagattccagcttcattctggcagcggcagttttttttaaaatttatttaaaaaaatttttttttcattctttttgtnnnnnnnnnnnnnnnnnnnnnnnnnnnnnnnnnnnnnnnnnnnnnnnnnnnnnnnnnnnnnnnnnnnnnnnnnnctccactcctgcctcaagcaatctgttgagtttctaaattgtccagagtggcttatggcttcgaaccaagaacaaggacacccacagggttaatagatcatgacactcacttctgcccctaagcaggctggcatcttgcacctgtttcagaatcccccaagacacaggtgggtggggtgtctcccagggtagtcactagcaacctcccagctggtcctcagagagtggcatcatgggaggaaagtgaggctggaaagagaacagaacattctagaaccttctttgtgtgtttcataaaggtacgcactacagtgtccacactgacaagacagaatgtgacacccttacaatgccaaagccatggttctcttgagtttatccaacaaagggcgagagtgtggctctaattccggttgaggctgccgtccctgggaaagttgtatgtcggcaaacgctggggttgtgtggatatatttatatttatagacatttccagatagtccacctcagaaggctgtgcttcccaaagaatattagccatgacaacacgaggaaccagttttgaatactccacctttggaggcacaaatggttccaatgcaagacccaaaccaagactttacaaccctttagctgacttggtgggctctgctcaaaggcaaacagagtacctccatacccctggagctagctcatccactctattgtttttgttgttgttaattatgtatatctgtagtttttcttgagcacattctcacgagagctgatgagctcagctcactaattccagcctaggccaataacgggataaccactgactcttcagcagcgcctacctcctcattcctgccgcgaatgggaggccacacaaccctgggcatatcacattccagtttattctcccaataagccacaccggaatgtcccacgtaataaaatcggtgactctccacctgctggatatgtgagccaggaaagccccagagctcagagctgacggggcttcgcgaaacgaaagcccttcattctgagagtgttagttttgacgacatttggagtccccctgtgcgagaatagagagcctttctccccccccccatcccccgctccgccccctcccgctctctcagggagggaagtggaggnnnnnnnnnnnnnnnnnnnnnnnnnnnnnnnnnnnnnnnnnnnnnnnnnnnnnnnnnnnnnnnnnnnnnnnnnnnnnnnnnnnnnnnnnnnnnnnnnnnnnnnnnnnnnnnnnnnnnnnnnnnnnnnnnnnnnnnnnnnnnnnnnnnnnnnnnnnnnnnnnnnnnnnnnnnnnnnnnnnnnnnnnnnnnnnnnnnnnnnnnnnnnnnnnnnnnnnnnnnnnnnnnnnnnnnnnnnnnnnnnnnnnnnntgctcccgggctggaggctctgcgaaaggtccgggggcggtgcggttccggggaaagggaccacaagtgggggcggccgcggctgagtgtgagcggttcagatgggagatcactggcgataacccggcccgggatggcgacgctcgacaggaaacctcgagcaagcagggagccagctgcgggccaaggaggaggggtgactttcggtaaccgcacagcagccggcgggacagcagcggagtgtagggcagcgccccccccccccatgtccctgctcactgatcttcacttttgactatgcactcctgcacgatagggctctaagaggtgttggggaaaaaaaagcccagcagcaactagtttcaaatgtgtccgctgggcgcacccaggtttcaccgcaggaggttccggggtagttggtgaatggacccctctttacagcctaaaatcgctctaaaatcagaatggcaggctatctcccagcctccagtctgggcaaggcagggtgacacaaccacagcgtgattcatcagtactttgcgctgccaacgaaggaaaagagcctgcagtgtgagggggtccccgcgtgacagcctctgtcccccactgacagccccgcccctgggagctgccagaggcaggaaggcaagctaaggcatagaaacctggttttagctccggctctgggtgctgtaaaacctctccgcatccagtgtcctgaacaaccgggccaccaagatcagctccaggaagaggttgaccagacgaagccttcctggttcccttggctccattggacttctttgggtaacctaagcagtctgtggcccagaaacccgggaagaacccaggaaacaccccattccggctaagggtgggacccgctgaagggactcttggatttgaaggactgcttcacatctcacctgcctggccctgctgttgctttaagtgtgtattgggggcttgtacagtgaacacggctcatgtctacagcattggatcacagaaacagtggccggcaatcatcgtttctatgtgcactagaaatgtacatagtaaaaatctgtgtgtgaaatatgcatgcgtacctggtcttgtgtgtgccgtgccagaggtcagaggtccatgtctgcaacgcttcaccgttttaaggcatccatcttcacgtagcctagagtcactgatgtggctccggagctcctggggtccttctgcttcctgcttctccaccctaccaccaggattacaaatgcaggctactgacagggcgtttatggcaaggctggggaatctgacctcaagtccgcaggcttgaacagtaaatcctttccctgctgagccatctccccaatgaaccctggtgtcctagtgttctattttatttatttattttttgagtctcaggatatatgtattttaacttcattcttctatatttggggggtagaggcagtgctggtggctaaacacagggccctgaccacactaggaaagcactctctactatgtcccagctccatctttagtgtgtcagagtgtcaagaatacccacaatgccacacaaccattgctactatttatttccaccattttcgtcatcccgagcaaagctgcatctagatacactttaatgcacacatatacctatgtagcctatatgtttctaatttttatataaattagtttgtatagtaactctagagtgtacagggctgctctttttaaccaaattttctcagagatctttctagcacagtcagagggagttctctattgtcagtgagaggtgggttttttccctctcctcagacagggtttcttgtagcccaggctggcctggaatttcacatcctttggtccctagcttctcagtgaggggattacatgtactgtatattgaactcagggttctgtgaatgcctggcaatcagtctgccccctgagctacaccccaggctcttgtaggcatatacaactactatagaaagacattgtaatttttcactcctggtaagtagacatttctgttatcttcatgttttttttccttcttctgagggtaatgatgcaacggtcatttctgtgtacacatctctgcacaccaaggttttctatgaaacaagagctcagagaaatggcaaatcctgtttagcattttgacgggggccatgatttgagaggatttcttttaagttgagctaatgtgcagtgaggaaaagagcagagacctgagtaggctggcctcgctctcaggctctgcctgccacccgtgtgcagtgggaccccaggtcagtcactttacctcccaacccccaaccttccgtctctttatttgcaaaagtggagcaaatcagagcttcccagtttacctcagtccattgttaccactaaatgaaatacaactctaaaagcatttctagattcaaagtgtggagggagccagtgtttagcaggaccatggctgtgacagtcagcagctatatgccaaagctagcatcaagaagaagggatgggtctcctctccgtacctgttgatgtatgcagatatgtaaatatacacaacacccttgtatattgtcctttgtatatgcattgctgactttttttgtatgtttgttgacattgagtctttttctatgtagccctggatagcctgaagctccatatgtagaccaggctggcttcaaactcagagacctttctgcccctgcttctactgtgagggatgccccacccaaccctacaatgcattgttttttttacaagatctttatatattccacccgtagcacagcgaaggagaacaaggagaccattaaaaacagtatttaggggctggcccagccaagaaaggcaccggctctccaacttgatgacctgagttcaatccctccaacccacatggtggaactcgagaaccaactcaggcaagtcgctgtctgacctacgtgtgtgcactcatacacatatgcacacacacaaacatgcataagcagatgcaaaaatcgtttaagagatgcactaaaactatgaagtagccccaaatataaagcatggttccgtaaaacaacattaactattacaacatttgagaagctatagcacagactgaagaaaagcacagcttttgttttgttttgttttgcttggtttttttcccccctcaggaaaaaatgttttgattcagggttatcgtaagtgataaatagcagacttgttggaaggcaagctgttattatacttctaagtgaccgtgtttcaacatgacattatgagagattttgatagtttttcttacctttctgcacttttataatgagttcattttacttgaaaataggaaaaaaaacacaataacagaaaaatgtaaaaacattgtgcaaaccacaactttaatggaaataaacagaaagggaaaaatcgctgcccacgatcactctaaatctaagaaataaaacagcccctttctctgcttgggatctttgttacggggatgtgcggtttgtaggtggcagtgaccaggttggaagcatcataacagaacaggaatacgtgcatacagacgctgttggagggtgaggggcctggggcaacttacagcggggagtgacatgtggcacttgtaaattgtggagcgttgccttgaaagtcagggccatcagagtaaatcaaggaaaagctaggcactaaggatgctggccagtgtatgtcctgaccttgcagtatctgtgtatctccacctctcagcctcaaacaactctctgaagaccagcaagaaagacccctaagagtagaactgagtggcatttaagagcctctcagagattcagtttccccagttgtagagtaagagtcatggtgaagtctgcataaaactcacctctggttctaggcacagaaggaaccccagctagtgggctgtcacagatatgtcatgtgtctagcttgcatccttcttgctgcaatgaaggctaaaggcagcaacccctgatggaaaagcctgtgtgcccccatgctgtggtcagtggactggcaccaggtccggctctgccctccacagtcacccccaccgctgctgctgccactgccttcctgagaacacgtgatttcctgttttctaaattcttaacctacaatgtcatctgtcagttgagtctgaggtgggggtggggggtggacgtcagcaagacccagggtcccaagctggggctccaaacagaggaagctaaggggctgagaaggtggctgctcctacctagatgagccatatggtcaccacagatggcattgagtcctttgtactgagtgtgcatggggtctaaaggatcatagagtggggtgagaggtaggggtattaggggtggctaggttggtttcatggtcacatggccttggcctcaaattggctccccttcaagcatttggcctataaactagacattcaaagactgagaaagagagctctccaccaggggttgggtgggtggagcgcttctcaccccaacagtatgcaagcaaaggctggaaggctggtcagagaagtctttatgaaggcctggggctattcagatgaaaggagtcccctaggcactgggacaaagtggagcagaaggaacttggctccaggggcactcagggactttccagctcagtgacctttgggagccctgttcttatctgcgaaaacacaattatcaacgaacctggtggaattgtaaacaattgcactgagcgttaaaccagactgtgcaaggagaacgagttttctaaactgtatgcagaacagcaccgatgggagtcttattgtggtttgtgaagccaggagccttcagaatgcccgctgcccctctacgatgagcgtcttctatagtcaggccctccgtacctattggtgatctgacttcatctacacaatgctcttgaaagccagcttccatcattgtgtgttggagagtctgcccagcttccgtccccaaacctagcatgaaggggagagagtgcctgtcctctactttctgctgcctgcacctacagagcctctgtgtgacaaggacacactgctggagtcctgcagggttggcacatgccactgtgcaggggtcctctcatgcactttgaccccatttgctcttccggccctgtggtgtcagtctcactaagtcattttggcaggcagaggactgaaggccagagttaagagagttctcaaacactaagccaatgagaatagactccgaccttgactaatgagcgtcttcctgcctcagaggcctgcgctcttccctcatgtctcttggctagtggtacaccccagtgaggaaaaccagaatgaaccagctgctttccagcacccactgaaagggaataaaccaagtgacgtatgtggtcacacacgactgagaccaagtatccaaagtaagggctgtgcattcataggtaggtgggttttctggagcctgcactgaaggtgaggaggttccccagactgagggatgaggaagtgtccagaatcaggcagacactctagcttggccatttgttggcaagtgttccggatgaagttgcttcagtttatcaagctgtgtactgggccccatcaaagctttctacctgctttctggactcctctcagagtcgaactctatcagaatcggggagtcattttaacagcaaaagctgtggtcagatgatttgagggagtggagcagatgcccagcttctcaactggatctgctggaagagttaggtgtggagacacagcagagtgtgtctgcagctttgagaggatcctgctgattaagacctaatccctgtggtgggaagcaagagcctggctgggagacactgacaacaggctgcacgtcactggagggatgagactgttagcactcctgtctcctcaggctgccctttcatgtgtcatggcacctgaaccaaggctcttgtgagggtgacaattcagggatgactgtgctctctcttgctaaggacattagtctttgaactgatgggtactctgacagatactccttgagctatcactagctgccctggggacctccaccgagtctatgccaggtgtcccgccacaaggcaaagacaacagctttttagccatgggcttaaaagtgaaaaagaagtgctctggccaaccagcattatgagaacaaatcaggtccctcacctggtaaatctaattatccgtgctcctccatcaccaagaggataagtaatgttacttcctctataaggagaggaaatagaggctaaagatggccagagccaggagcattgcagccatgccttggagcagagcatgaatgtgcttctcaacccggctgggacattttctcttgtgcagatggtctggctgcatagctatagaaggccacatttctctgtccacgatctgggctgtatcagctctgttggattctggatctccccagccagtactgaagtccccctacccaggccctagcccacagtggttaagtcaacctctccagggagctcgggagcccatcctaacaggcaggcaggcaggcaggcaggcaggcaggcttaccggtctggggccctagaactgttaattggctattgggttttctctcatatgttggagttttcctgggtgctgggatctaaagtacaggtggagaccaaagataaagtgacttccattgtacaagaaagcagttgccatagctggcccctagatacatcctgggaagcgtctgagggctgtgccggggatgagctgcggcagagagagagagagagagagagagagagagagagagagagagagagagagagagagagagagagagaaagagagagagagacggcagagacagagatggcagagacagagacagcagagacagacagagacgagagcagggtgtgcaaatggctcagggtaggagccggtcaggtctctgcctgcaagtaggaggggacaaggaagacactgggatcagaccatacaatcaccacaagtgacatcgtgaagagctgctgctggaatggatgcctgaacatcagacaccattggctttatagaagatagaaaacctgccacttacaagccacctggcaaagcatccttgtgatagcccttaaggccgatataagcactcccaacatgttcttaggaacagagggctttaggcccagagaagtgaggttaccctctaggaccacacagctagtaaacgggaatggggaaccatggaagccacctgccccaaactcagcctgtctccagttctgcagctcttggcccagagccagtgcccaacaaatagctaataaattatgcgactgacttaggtcctgagttcttgcatggaatttcctgggctatcactacattctttaggcccacctctcagtacacagactgtagggctgaggacaggaaccatccgtgcaaagagttggattaatgctctatccttgccaaccccacacgtagcacttttgttgctggccataaaacttgtgcttctctttacagagaaagtgagaaaacttgtcctgttattcatctctgggggatgggtgtgtgtgtgtgtgtgtgtgtgtgtgtgtgtgcccaactccccgcctgccacctaccgtgctgactctgcacaacacaaagaaatatttcttcttatttgttctaaatttactgtccagtattttttctgttctcatttcacacgacaggcagctgagtgattttctcctggctttctctatgaatttcaaccacccggtaaatcgccgctgacatatctccagccctaaaagacaacagccaccccagcttctgtggcctttactggagggctggcttgcttcttagatcatagaatagcctggggctggagcctatcatcttcccatccttgaaccgtaccctcctctcaactgtaggaaatttaagaaatgcctgtctcaggcaggcatgatgttggggatggggttggagacaaaaggaaaaagacgcagccactggcttacattctgagaagggaagtctgaatccagagaactctgtagggatctaggctttgcagtcgccagcattccctggctttccctggaggactcaggtttctgattcctgaaggtgctgggcagagcaagcagaggcacagaggaggagccaggcgaacagaaagtgggtgtggagggaattagagagcatactaagattaagggggcagcgaggataaaggaggaagtgttgggatatggctcagtaggtaaagtgtttgcctgccacgtgtgaagccctggggttgagtcccagaatcaccaagcacagagatgtacatctgtaaattcccaggactccagatgtggatgcagggcattgcaaagccaaggctgtccttggtgctataagttcaatgccagactggaacacatgagacagttgaagaagggacagggtggtagtgagttctttccagtctggcctggaaaggcagagcatttgtggggctgcactgagtcccacactttgaagtgtctttgagcgggattgagttggtttctgagcagggacctggggccaggagggaccctggatgagagagttggagttaaaagctgagaacagagggctttagggacatggtgatgggggacagtgagtgagatttaagtcagccttctattgtatgtgggagcagatgagaggtttctggcatagtcactacctgcctgctctgtgtgcttctggtggcaatctagcggggccttaatgattgcgctcacagccataaacactgcacagaacagacactgaagactttcaacctgttttgcagaagaggcagctggaaggataccttgccggaacttaactggcacccatctgccttacccactgttggccagcgcccaccagagggcgccacttgctactggcgttaggctggaaagccttaaagaccactctgcttgtgtggttctcaggcagggccagagggagggttttgtgatactgggccagttctcagatccacacttacccaataggagggagttcaggatcagtaatatgctcagtttgcttgctttgtgtgatctttcaaataggaaggctaccttctatctaactaacgtatttcctttcctcactccccctgcccttcttatctactgagaaccatacatgctttgagtgtgattcgataaacatcagaaaggcaggaggggtgactctggagtgaggagactaagtagaagaggctctaagctgaaacatgtagtctgcctggaacctatgtagctcaggctggcctcgaactcacaaccctcttgcctgttcagtgatgggactactgatgtgcaccacgatacctagacttcactgataatgactaggtattgagatgattttatccaattatctaatttctgagccctacatttgtaacctctagagtctctctctctccgtataaaggccttagttacctaggtacatttctgaggtttagagtgtcatagtttatgcaagagctcacttacagcggggcttccatgtcaccagagcagaagttctgtgcacagcagtttcattttttcctaatactccctcattcttcccagcctctgtggttacatctggtacattggttacattgtatgcataggtgcactcgttacatctgatacaagtggttacactgtatgcataggtgcactcattacatctggtacacatggttacattgtatgcataggtgcactcgttacatctggtacacgtggttacattgtatgcataggtgcactcgttacatctggtacacgtggttacattgtatgcataggtgcactccttacatctggtacatgtggttacattgtatgcattggtgcactcgttacatctggtacatgtggttacattgtatgcattggtgcactcgttacatctggtacatgtggttacattgtatgcataggtgcactctttacatctggtacatgtggttacattggccattgcaggctgggtttcttcagactcagtgagagaggttgtaggttgtggtctgtgtgaagtatgaggactggacctagtgcccgtgacatgactacaatctgtcacagaattgacctggggtaggtgggatgtgttcttgccagatccagcatgcctaaccaattttctctcttggcacagaggcacagagctttggtctgctggatcccaaactctgctacttgctagatggaatcctcttcatctacggagtcatcatcacagccctgtacctgagagcaaaagtgggttcccctgggctcttgagggagggtataggttcctccactgggaggatgtgaggtggggatttggcactggagagtctcaggcctgtgctctgcttggtgtccatgggcaaggcaggatacaaccaagcgtgcacagccggtgagcagagaaggcggggtatccatctgtggcagacagagcagctcaatgatccaagtgctatgtgtattactgaagatcggtaccagtgcctggatgtggcttctgctgggaaacagatggcttatactgaacagtttaggacaagaaagtgaaagacagacaagacagcctcttcttagggcctgcggttgagctgtaatggaggccatacagcttttctctccaactcttgattttcccatcctggaaataagaatggtggacagagcatcaggcatcacctggtgcctgaagccgtgggtttgtggaaaggacacacctgggaaggtagaaatctcatcttcccagggcagtagaacccatttcctttcaggcataagatttcatttgaggaagtcttactttatgatttttttttaaatttggaaactacacttagcaccaactctggaaaatcctgcagttcctctcagcttaggtaacatgtgtggttatagcgactcggggcacacagtcaggacagtaagcaagcaaggtgcttcccactcaggaaacagctgggtgagtaatgatgcccatgtgccaacttagtaggaagctttttgtaggcactgtctaccctcagggttcctggaggaaggggaacaggaggggtttcctggattccggcaggcacagacggagagcctggaacccctgcacacagggtgtgtgggggtgtgtggggggggcaaggcctttacttgggatgattaacttctctgaagactaaagctgtaagcactttagtcaggtcgcaggcaggagaaaggacaactgagttcagaaagaagcggctacactttgggctagccacagggagccaacaagggagtttgttgtcatcgggcatggaggggctgacacgcagctctgcactatagccagtccgatggccccttggaggtggtgctgagctctgattctctctgctctgttgcagttcagcaggagtgcagagactgctgccaacctgcaggaccccaaccagctctacaatgtaagttcccccttctgcagaccttcttggaaagccttgtcctaggacctagggaaacttcaaggtcaggttaagctgtaggtctggtccaaagctattggcctggtggctgggtggcaagcctttgagcctcaggtttctaatcctgactggagcggaatcctgcttgcccctcagtgctgctatgaggacgaggagctttaagaatgagatgcatggcatggccctgcctcaggagaactttcagtcactagcaattttgcaaaggcaagaggccacagcacagagggaagggtcccacagaaacgcagtggggctctggtctgtgagattcccctctaggtgcctccatttcgcatgctaatgaaagtgtatcattaaccctattagatcagcacatggtgacttgggggttcccaccatgtgccagcaaggtagcaggtgttttctgaggcgctagcttgaagatgaagcagttcccaccacctttcttgccttgatccatgctttaactggagagatagtgaagggtgcttggtgttcttgcagaggacgcagccttgcccccagccttgcacctactggctcacaaatatctgtaactcaagcccaggggatctgatgcctcttctgcaggcatgtggtgcacaggcatacatcaggcacacacacatacacataacacacataaaatgtaaaaattacatttgctttttattgtgctttgtgtgtgtgtatgtgtaccgtgatgcacacataaaggtcagaggacttctcttttgccatgtgggccctggggattgaactcagatctttaggcagaggccagtgccttccccacccacatacctcacttcccctatgctgctttgtttctttttgagccaccgggtgggaaaccaactccagttttggtcaatgtgaccccattctcctcaaggtcctgtttcctcttctaggagctcaatctagggcgaagagaggaatatgacgtcttggagaagaagcgggctcgggatccagagatgggaggcaaacaggtagggcgctcctccgcttctgagtgtgtgggcttcgaggctatagcagcaggtgggcattggactctggcctgggacaagaggatgacagacacttgctgttgtgccttccctttcttcttggttccattctgcgtcagaaggaacctcagtactcagatcgtccttgccttcacgtccatctcccctctactgcgccttagccaacacgatgtcaagatacacacaggaagggctaagcctgtggagaaggcattctggattctgaatacccctctagaacatggccacatcaggctccaggggcctgtgccctgtagggaggggaagggatgggggactcctccgatgcacgagaggcctcttaatagcaggactcaggacaaaaatcccagtgtaaggtcagtgctactcaaagctacccagtgtcctcaatgcttctggtcagacatgcccacttggccctgacctcttagtcctaggtgttgctagagggcatggcaagaaataaaattcctcattcctatttcagtctccagcctcagctcttctccacgggacccggagggtatggggaagggcaaagagtggccacagaaacacagaaacactgaagagcactgactggctgcctctgaatgaggtgacccagcccgtgtctctgtttatggtgcgtgtgagggcgtgagagagcaagggggctgagagatcaccagcagcctaagacatgtccaggtgggagtatgaagtgtggtaggtatgcattgtagagtccctgcccagaggtgtgtgggacggaccaagggcgacctgagcaaggcttgggcaatatggagattgatagctgagccatagggcagggggtagcaggccaggcagcatgaggtcattacacttgccagcctggattctctcaagctcatctctgcgcctttctattccccagcagaggaggaggaacccccaggaaggcgtatacaatgtaagtatgggagagttcaccattcaccctagacagatggaagagggctggcagaggtgctttctgtccaggctagtccatgccttccctgggtggccatgtgccacctgctggtagctttagaacatcctcttatgctgggcagggtcacagcacctcatttcctctgcctttttcttgctgttctgtgggccctgagcctgtgcttggggaactgggcagaagctgcaggctacgctgggtaggagtgtggagccggcttgtcttgagaggacgctcatcccgagggctggagtattctgaacactttctctcattgtaaagttcacccccaccacagtggtgtgaaactagtttcagaccaccaaggtgctccttgccgctgttggtatagcactgcgattggctgatccacagcctgtggtatcagctatgaagagatggcttgttcaaataaatgactctttgctccccctgagcccttatattgtccaatctccctgtcttggtttacagttctaaatcccattttcctgcatctaatgtgaatcgctcaatgtatagatccggtagatcagggaagatttcaaagtcagggttgtgggcagcaatgtttgtatgcctaaggcgtggagccctggcaactggagcctggcagcctgggcacccggaggcttctgagggaatgctctctctgtgttggttaagaagagaatgtgtcacctcttctcttcctgtaggcactgcagaaagacaagatggcagaagcctacagtgagatcggcacaaaaggcgaggtgagcgctgctcttccttgaagccctaggcaggcaggttccttctggtacgaagtcttcctttcccatccattcctccttcaactaagacaagcccatgtgacggcagccatgagcataggtactgccggacagtacatgggactaaggatggactgaggtgtcaggtctcaaaggcaaacctagagcctgtgctaagccctgctggaagcggatcgaaccttttcaagtagtgtcgctgtttatatagtactgttgtgtgcttactgcgtgctgacatggggtcccggggggggggggaatgaaagtgtatggccccttgtttattgatgattttgtaagaacttgaaaatatctaggctagagcattgagttctgagtatggggccctgggcaatgctctaccagggagaggggttgctggttaggaagccgtcccttctgatcccttgagtaggggcagttgagcaagggtgctacaactgactctcttcctctctaatctcctttcagaggcggagaggcaaggggcacgatggcctttaccaggtgagagtggccggcgcccaccctgggcggcacaaaaggggtagagctgaagctactgtagtctgctggtggcacaggcctttgtcaacagacaggacacgcaagcccagggcacacaagtggactggaggtcactccacggccactatggctctacagcttggttgggactcagctgtggaagcgacacatcatttgtatatagcagacaaaagcagctatctagggaggtgggaagggagccccaagaggtgcaggcaagaaacgtaaaggattctctacagctgactgtttcctttgcctcctgggctagcttagttctgctcccccctccccaattgcaagactaagagtgggcagaaaggctgggcagtggtggtccatgcctttaatcccagcacttgggaggcagagacaggcggatttctgagttcgaggctagcctggtctacagagtgagttccaggacagccagggctatacagagaaaccctgtctcgaaaaacaaacaaacaaacaaacaaaaagtgggcagaaagattgaataaaaaaaaaaaagacatcaaaaggacctttcaaaaggaaaacattgtaatcaggtgcctggtttatgtaatttatgcaaacaacgtgcagagaccctactttcctaaaaagggctccctagtgacttcatatttcctgttgctgggatagggaggaagaggctgtccagccagactggggccagctttgcctgaatatacattccacagtggccagagcccggaagctcccggagaaggactgagttaaagagggaccactttccctgtgactagtccagactctctgtgggtccaggtagcacattgtctggcacctcctgggtcccagctcagtgtgtgacatggggaagccaccttcctctttggtcagatgggaatctgatgggccctgtgtgctgcagggcacggtgtctgagttgagaaaagtagagaatcaagctgggaaaagacttgcttgagtcatttgtagcaggacaaagaaccaatctttctgtcagcattctcaggcaagattcccacctgggacgtgaagggatcctcttgggctcctgaagggaccgtggatgagctacagagagtaagcttgtacctgtgagctcctgttcacccttctgtcacttgctttcaccagggtctcagcactgccaccaaggacacctatgatgccctgcatatgcagaccctggcccctcgctaacagccagggcatttctccctcacgggcttcacctgctgatgtcacttgtgaaggacagaggacaaagcccccctcagtttattcatttcccagccaccatttcatgacgaggatggttctctcacttgccacatttgtcttcttcagttccagagcactgaacacagaacgtcatccctggactctctaaagggagagccacccttgctcttccaccccagccctgctcttgggtcttctggcaggctcctctccttgcagagcccagccctagctaggagttgggggtggagggtggggcactaacacactccctcctgcagctagctgagttcagtttgctttgtaaagtccccagagaagccctaggtactgtgtgtattgttctatgggtattgactcgctccgctcctgctgtaaatttggcttctgttgtcacactttgcagtgttgaggtaacatgtaattaggccacattgtgaaaggcagagaggcaggtacaagggagtccaggtaaatgccagccagaggtggctcaaagaagggaagcaacacacaaggaaggttcctagccacaggggaacagtaacaaggggcctctttccatcaagagtactttccacatctcccagcctttgtgccaggcactccaggaacggtaagatgtcttaccttcatgaagaccatgcttttaagagtgcaaataacttgtgtacaaactgacacagaaaataggatgggccattaccgccaacgacaagggagcaagagaaaagggagcaagtcctgccttcttccaggaactcggttcatccctgtcaggtggcaggaagacccagaccacccaggtctgcaacgttcccagtgacaatcagtggccggcaaggtcattgtgtcattaaagtgcctgtacccatggatggggaaccctctgatcgcctgggttttttaatttataccagcttgctattttgcataataaacactttgctaaaaatgatctttgaagccttatttcagtggtgaagcctggggtagcaatgcagacaggaccgcagaaggcagcctctgcagaaagtgatgttagattcagttaggaacgggcagggggcaggggtacccatgcatgaagccatcctgaaggttctctttaacgcatggggtagtgcctattgttggatgctggcacgaggctggctttgggccatcacacagggaaatgctcagtgaaagaatagggacctggcctggccttaggattgaaccggaagaggatggtggaaaggcgtcctgaggcgaacttcactttgagtgcaggagaacttggcagtaatactgagcagagcatttaggtgtgcctggcagctgccatggccctcacacaggggtggggagtggacagcagtattagatcagcttccttcatcaaaggtgacctttaccttagtagtgccttctctaagtagagcatctctacttaagagttcccagttcatcaagcccaattaatgatggacaaaagaataaaatttgtacattggctttataaacagaaatccaaggctgtttattaaaaggccctgaaaattagcgatcccaacaccaatattaacagcataaatagaaagggcttctatgtacacattcctggcaggggcagttcactcacttttaagcctgaagttggggtctttaggcagaatgcacctaacatccaggcctgttctaggcctcatttcaagatcagctaagtagatgtggctggaaaataaaaatctgacccagttctgttacgaatattctcttaggcaaagggaagggctggcagcgagctgcaatgtaactacggagaaagcaagcattgggagaaactgagcagatgtggtcacagaatcagacctggggaaccagagttcctggggagggggcggtgctcgagattcaaggtgacactggcaagcctggactcctgccttgcctgaggcctcgcagtgacctctttcctaacatgatcagtctttcattnnnnnnnnnnnnnnnnnnnnnnnnnnnnnnnnnnnnnnnnnnnnnnnnnnnnnnnnnnnnnnnnnnnnnnnnnnnnnnnnnnnnnnnnnnnnnnnnnnnnnnnnnnnnnnnnnnnnnnnnnnnnnnnnnnnnnnnnnnnnnnnnnnnnnnnnnnnnnnnnnnnnnnnnnnnnnnnnnnnnnnnnnnnnnnnnnnnnnnnnnnnnnnnnnnnnnnnnnnnnnnnnnnnnnnnnnnnnnnnnnnnnnnnnnnnnnnnnnnnnnnnnnnnnnnnnnnnnnnnnnnnnnnnnnnnnnnnnnnnnnnnnnnnnnnnnnnnnnnnnnnnnnnnnnnnnnnnnnnnnnnnnnnnnnnnnnnnnnnnnnnnnnnnnnnnnnnnnnnnnnnnnnnnnnnnnnnnnnnnnnnnnnnnnnnnnnnnnnnnnnnnnnnnnnnnnnnnnnnnnnnnnnnnnnnnnnnnnnnnnnnnnnnnnnnnnnnnnnnnnnnnnnnnnnnnnnnnnnnnnnnnnnnnnnnnnnnnnnnnnnnnnnnnnnnnnnnnnnnnnnnnnnnnnnnnnnnnnnnnnnnnnnnnnnnnnnnnnnnnnnnnnnnnnnnnnnnnnnnnnnnnnnnnnnnnnnnnnnnnnnnnnnnnnnnnnnnnnnnnnnnnnnnnnnnnnnnnnnnnnnnnnnnnnnnnnnnnnnnnnnnnnnnnnnnnnnnnnnnnnnnnnnnnnnnnnnnnnnnnnnnnnnnnnnnnnnnnnnnnnnnnnnnnnnnnnnnnnnnnnnnnnnnnnnnnnnnnnnnnnnnnnnnnnnnnnnnnnnnnnnnnnnnnnnnnnnnnnnnnnnnnnnnnnnnnnnnnnnnnnnnnnnnnnnnnnnnnnnnnnnnnnnnnnnnnnnnnnnnnnnnnnnnnnnnnnnnnnnnnnnnnnnnnnnnnnnnnnnnnnnnnnnnnnnnnnnnnnnnnnnnnnnnnnnnnnnnnnnnnnnnnnnnnnnnnnnnnnnnnnnnnnnnnnnnnnnnnnnnnnnnnnnnnnnnnnnnnnnnnnnnnnnnnnnnnnnnnnnnnnnnnnnnnnnnnnnnnnnnnnnnnnnnnnnnnnnnnnnnnnnnnnnnnnnnnnnnnnnnnnnnnnnnnnnnnnnnnnnnnnnnnnnnnnnnnnnnnnnnnnnnnnnnnnnnnnnnnnnnnnnnnnnnnnnnnnnnnnnnnnnnnnnnnnnnnnnnnnnnnnnnnnnnnnnnnnnnnnnnnnnnnnnnnnnnnnnnnnnnnnnnnnnnnnnnnnnnnnnnnnnnnnnnnnnnnnnnnnnnnnnnnnnnnnnnnnnnnnnnnnnnnnnnnnnnnnnnnnnnnnnnnnnnnnnnnnnnnnnnnnnnnnnnnnnnnnnnnnnnnnnnnnnnnnnnnnnnnnnnnnnnnnnnnnnnnnnnnnnnnnnnnnnnnnnnnnnnnnnnnnnnnnnnnnnnnnnnnnnnnnnnnnnnnnnnnnnnnnnnnnnnnnnnnnnnnnnnnnnnnnnnnnnnnnnnnnnnnnnnnnnnnnnnnnnnnnnnnnnnnnnnnnnnnnnnnnnnnnnnnnnnnnnnnnnnnnnnnnnnnnnnnnnnnnnnnnnnnnnnnnnnnnnnnnnnnnnnnnnnnnnnnnnnnnnnnnnnnnnnnnnnnnnnnnnnnnnnnnnnnnnnnnnnnnnnnnnnnnnnnnnnnnnnnnnnnnnnnnnnnnnnnnnnnnnnnnnnnnnnnnnnnnnnnnnnnnnnnnnnnnnnnnnnnnnnnnnnnnnnnnnnnnnnnnnnnnnnnnnnnnnnnnnnnnnnnnnnnnnnnnnnnnnnnnnnnnnnnnnnnnnnnnnnnnnnnnnnnnnnnnnnnnnnnnnnnnnnnnnnnnnnnnnnnnnnnnnnnnnnnnnnnnnnnnnnnnnnnnnnnnnnnnnnnnnnnnnnnnnnnnnnnnnnnnnnnnnnnnnnnnnnnnnnnnnnnnnnnnnnnnnnnnnnnnnnnnnnnnnnnnnnnnnnnnnnnnnnnnnnnnnnnnnnnnnnnnnnnnnnnnnnnnnnnnnnnnnnnnnnnnnnnnnnnntcctggggagggaggggtgctcgagtattcaaggtgacactggcggcttctcaaacagcctggactcctgccttgcctgaggcctcgcagtgaactctttcctaacatgatcagtctttcattctagatactactagctgtaagatatggagtactatcacttgtttcagagggtttcacacatgttaaacataaatggttttatttcatggttacaaatgtaaagacatgtttaaaaaaaaaaggctggaaagatagctcagtggttgagtgcatgttgttcttgcagagagcccaggtctttggaatgagagaaggctctttacagagagactctttaccaatcctgtggggacctctgcttcctatgaggcctgagaagcagctagaataaagctactttctaaaaggaggctaggagggccagtcttacctcttcatagggataacatacgtttgcttactagagtcattcttacgaaagaaggtgtcgttatctttaccaaagagaatgttaaaacttttgacgttacttaaaaaaataactctacagacttacatgtaagacataaatattagaagggaaaggaaaaaattcatttaacttatgagcagaagggagagcccataggtctttttgctttgacactttgtcattttgagatgggctcttgttagcacatgcctgtcagaggcacttcccaaagctcttcaaaagcttaagacttctctctgtgggaaattctaggattctactttccttatgacatcagagcaccagatgttgaactgtctagaaggcaggagcttagttatgcacacggcaggaccaagggcccatctgagatgtgccaccttcagaggatcctctcccaccactccaccactcttggttcagggcatggtaagaaatgctggaggttcttgggcctgtcagacaaacaactgagcctggagagtcaagttcaatcccagcagagacagacagacagacagacacacatacacactggcagggatcagtcaagggcctttgtgtttgaccatacaaagcagtcagctctgaaggagactattgctactcaactcagggtgccactaaatccagtggagggtctagagaagggaaacacagtggccaccgctcactaaggaagccaggagaggtcataagggcttgctcagactccgagattcccagggagaaccgtggggagaaatgtttcggaggcctgtaaatatccgtgcaaatgcttgtggagagcaccagaacgcccaggcagtgacctcacagagacacagacaatgtgaaaacacttggaaaatggtttaatgttttacaacagaaatgggaactgtacagttacagtaagtttaatatatataaaaaattacagcagacaaatgcatctacataaaacccagcatttcactctgattcactggcgcccacacaatctctcccaagccccgccctctggtgatccccggaggggctcacaaaaagggcacttttttttttaaagagacagcacctctcacagtcaccacttccccaggcctcaggagctatctgctatgcccagttagtagaagtgtttgggtttcaggttttccaaatcaagaaaaacacatttcccatgggcacagataacagggccagtgctccgagctatcagctgaatcttataaaatatccccattgaaggggaaatggctacagacgttctggggcagtgaggctacacaatagccacccagactgcaaattcatcttaaggagaaatgtcagaggacacccaataaactacccaggaacggctgctgctgctgcctcattaaagctgctgggcaactccggaaagaatcatgtacatcatgttgtaagtttccacaaagaagaactcaaaactcacattttaaaatacataaaataacatattttgggaggccaaggtgccagttcccttgtgttcctcccttgacaacagtggaaaaacacccctgaatcaatagtaattaaaaaagtaggaaaaaacaagtggggaagttaagatatttaaagacagaagcaaacatctttagaaaacacaatcaccgtctctttaaaaccagatcccagctgggcagtcatcagtgcctccagacactccgtggacactggtagagattgttatttaatagtatgtacactcagaacctctcacttttatatgaacacctaggcagtgaaaactgttatgttaatacatacagacacacccaaaacatacaaaaatactattatttcaaactaccaagaataggacagcgcagttatttcatgcgatgactttaagagcattacactgaaacaaacaagaagttaaacgacattttttttaatatcctggaaatataccaaaatatacatctaagctttggaattactgaggttagactaatgcaagtgccggataatcgtacttagtacacaagtctaaggttctgcaggaaagaaattgtctttggtatctgcatcaggctagtattattaacatttggattttgctttgggatagagcttgtatgaccctagaaccaaaacccccctcccccaatcaactgagattaaaaagatccatgtaaaaatttccttcatttgcaacccgcaacccacccacccccaagttaaaaagtcacaggcgtctacctagcacaaaggttatgaaatacaatgcatagttgcacagtggtgctgcaaaaggaaacaaaactagaaacaagattaaaaaaaagtttgacaattgttctgcatgtttcctcacaaacaggacagccacttccaagcagtgcagttcgggaacagaagagagagagaaggttcagaactcacaaggacccttgggttaagagcccgccccaaaggtgaaagcacccagcagagtagccaatcctgtgccagcgtcttcagcatccccactctgtggagtccatggccacccagtagcagctcccagctctaaggccctgtgctcagctctggtgatgaccctggctgctgtcacatgagttgtggtgaggatgggacttttgaaaaatctgatgttccaatttctttcatgcatgctctactcagaagtgagcaagggccaaaactcctgggcatgcatctgaatgaatctctcaacttagaaaagacttgcctgcccctctgagctggccaggtgtccccacctaccctttggcatgcctccaagtgccaggacgccacagactgcattggggccgaagacttcccttttctttggtttttttgtttgttttgagtttatacaatcattaagaaatctttggttttggctggaaatggaaaaacaaaacaaatcaaagaaaccaccctcccctggcttatagcagcagtattatgacctgacctggctgagctttccccccctccaactttgggggtggaaattgcaagttaagaactacattcaaagaaaacgttgaaagggccggagaagcagcttccagaaagcccgtcggatataagattgtcaaataataataactattattataatatattaataataaacttaaatatttgg

SEQ ID NO: 84 - DNA, 1678 bp, Mus musculus
cccacagtcctccacttcctggggtgtcagccacagaacaaagccagcagagactccatcagcgcctccttttctcctcatcctcccaggcatagctgcctctgcctctgcctctgggtaccatcccagggaagcagaagatgaagtggaaagtgtctgttctcgcctgcatcctccacgtgcggttcccaggagcagaggcacagagctttggtctgctggatcccaaactctgctacttgctagatggaatcctcttcatctacggagtcatcatcacagccctgtacctgagagcaaaattcagcaggagtgcagagactgctgccaacctgcaggaccccaaccagctctacaatgagctcaatctagggcgaagagaggaatatgacgtcttggagaagaagcgggctcgggatccagagatgggaggcaaacagcagaggaggaggaacccccaggaaggcgtatacaatgcactgcagaaagacaagatggcagaagcctacagtgagatcggcacaaaaggcgagaggcggagaggcaaggggcacgatggcctttaccagggtctcagcactgccaccaaggacacctatgatgccctgcatatgcagaccctggcccctcgctaacagccagggcatttctccctcacgggcttcacctgctgatgtcacttgtgaaggacagaggacaaagcccccctcagtttattcatttcccagccaccatttcatgacgaggatggttctctcacttgccacatttgtcttcttcagttccagagcactgaacacagaacgtcatccctggactctctaaagggagagccacccttgctcttccaccccagccctgctcttgggtcttctggcaggctcctctccttgcagagcccagccctagctaggagttgggggtggagggtggggcactaacacactccctcctgcagctagctgagttcagtttgctttgtaaagtccccagagaagccctaggtactgtgtgtattgttctatgggtattgactcgctccgctcctgctgtaaatttggcttctgttgtcacactttgcagtgttgaggtaacatgtaattaggccacattgtgaaaggcagagaggcaggtacaagggagtccaggtaaatgccagccagaggtggctcaaagaagggaagcaacacacaaggaaggttcctagccacaggggaacagtaacaaggggcctctttccatcaagagtactttccacatctcccagcctttgtgccaggcactccaggaacggtaagatgtcttaccttcatgaagaccatgcttttaagagtgcaaataacttgtgtacaaactgacacagaaaataggatgggccattaccgccaacgacaagggagcaagagaaaagggagcaagtcctgccttcttccaggaactcggttcatccctgtcaggtggcaggaagacccagaccacccaggtctgcaacgttcccagtgacaatcagtggccggcaaggtcattgtgtcattaaagtgcctgtacccatggatggggaaccctctgatcgcctgggttttttaatttataccagcttgctattttgcataataaacactttgctaaaaatgatctttgaagccttatttcagtggtgaagcctggggtagcaatg

SEQ ID NO: 85 - protein, 162 aa, Mus musculus
MKWKVSVLACILHVRFPGAEAQSFGLLDPKLCYLLDGILFIYGVIITALYLRAKFSRSAETAANLQDPNQLYNELNLGRREEYDVLEKKRARDPEMGGKQQRRRNPQEGVYNALQKDKMAEAYSEIGTKGERRRGKGHDGQGLSTATKDTYDALHMQTLAPR

SEQ ID NO: 86 - DNA, 1349 bp, Mus musculus
cccacagtcctccacttcctggggtgtcagccacagaacaaagccagcagagactccatcagcgcctccttttctcctcatcctcccaggcatagctgcctctgcctctgcctctgggtaccatcccagggaagcagaagatgaagtggaaagtgtctgttctcgcctgcatcctccacgtgcggttcccaggagcagaggcacagagctttggtctgctggatcccaaactctgctacttgctagatggaatcctcttcatctacggagtcatcatcacagccctgtacctgagagcaaaattcagcaggagtgcagagactgctgccaacctgcaggaccccaaccagctctacaatgagctcaatctagggcgaagagaggaatatgacgtcttggagaagaagcgggctcgggatccagagatgggaggcaaacagcagaggaggaggaacccccaggaaggcgtatacaatgcactgcagaaagacaagatggcagaagcctacagtgagatcggcacaaaaggcgagaggcggagaggcaaggggcacgatggcctttaccaggacagccacttccaagcagtgcagttcgggaacagaagagagagagaaggttcagaactcacaaggacccttgggttaagagcccgccccaaaggtgaaagcacccagcagagtagccaatcctgtgccagcgtcttcagcatccccactctgtggagtccatggccacccagtagcagctcccagctctaaggccctgtgctcagctctggtgatgaccctggctgctgtcacatgagttgtggtgaggatgggacttttgaaaaatctgatgttccaatttctttcatgcatgctctactcagaagtgagcaagggccaaaactcctgggcatgcatctgaatgaatctctcaacttagaaaagacttgcctgcccctctgagctggccaggtgtccccacctaccctttggcatgcctccaagtgccaggacgccacagactgcattggggccgaagacttcccttttctttggtttttttgtttgttttgagtttatacaatcattaagaaatctttggttttggctggaaatggaaaaacaaaacaaatcaaagaaaccaccctcccctggcttatagcagcagtattatgacctgacctggctgagctttccccccctccaactttgggggtggaaattgcaagttaagaactacattcaaagaaaacgttgaaagggccggagaagcagcttccagaaagcccgtcggatataagattgtcaaataataataactattattataatatattaataataaacttaaatatttgg

SEQ ID NO: 87 - protein, 204 aa, Mus musculus
MKWKVSVLACILHVRFPGAEAQSFGLLDPKLCYLLDGILFIYGVIITALYLRAKFSRSAETAANLQDPNQLYNELNLGRREEYDVLEKKRARDPEMGGKQQRRRNPQEGVYNALQKDKMAEAYSEIGTKGERRRGKGHDGQDSHFQAVQFGNRREREGSELTRTLGLRARPKGESTQQSSQSCASVFSIPTLWSPWPPSSSSQL

SEQ ID NO: 88 - DNA, 87847 bp, Homo sapiens
gggggagtgcgaatttcttggccctgtcggcaggtgctttctcaaaggccccacagtcctccacttcctggggaggtagctgcagaataaaaccagcagagactccttttctcctaaccgtcccggccaccgctgcctcagcctctgcctcccagcctctttctgagggaaaggacaagatgaagtggaaggcgcttttcaccgcggccatcctgcaggcacagttgccgattacaggtagggccgacgtgtcgacggcagggaacttctagaaactctttgtgtatgtgtaggggagtgggtgtgggtagtggagggtggtgaggggctggggtctccttcaaatcctgccctcctcaaatcaatgggcaagtgagcagtgaggggtccggcccggtgctggcatctgctccgtcacagccgagttgggcatcagttcagagccagctgctagaatacacagctcctccaggtacagatttttcgagtgataagagaggaaggaagaaggaagcaagagagcaaccgaggcaggcccagggtagagaaacggagagggagtgtttcacagaagctggacaggatcggaaaatgtcagccaggccatgtttcgtgctgcgacgttctagtcccttcagcttctttcaccctctggctggctccgtcactcagcccctttctttcttcctttgccaacaaagaagattttgttggtcagtcaaggtcatggcctgaaacactccaatgggcccgggagtaagtggggtaaccaaggaggagaggggcacaggcaggaagcaccgggtggcagcctccacagcgccttcgccacctcatggccaagcgtccgtgtctaggctcagccttgtcatggctgtccccacacccacgcctgggactgccgggtgacgcaccatcccaggctccgtgactcaccccagcctgccccttaggcggccatctagcccagccagagggcccggcattgacagaacacggggcagatgagacgatgtgcctggttaagtcaccaccacgagcagcgcccagccaacaagagtgcttgctcctcacctcattcccgatcgtgggagcccagctttgctgcaagcctttagcttccaccatgttttctagcccaggtaatgaggaagaaaaccagtgaaaagaggacaggacaaactgctcagggggatcagcctcgtggcatcttcctgagaagtggggcaggctgaatttcaatctaaagaaacagggaaggtgaagcaagcaaatgtcctcggcccacctgatcgctcctggtaactcacctgggtgtgggaatttgtttaggggccctgttgggagggcaggagaggccatgggcacttctgctcccaccagggagccaggcacagcccgggccagcgcctcgggggattctgaggcccgtgcagctgcaggggtttctgtcaggtcacagctgttttctcagaaaagccttgtggggtctaagtcacacacacagtgtggcagagtgagggtgcctgagcttgctcagagcagcccatccttgtgtgctggggacaaggggacccagaacgctggaatttagtgacttcaggggagacagccaggggcaatagctccagcctctgagcttcaggcttgagacaccacaccagggagctcatataacctttcagggtctttacctgcagtttcctcactggtccatttgtgttcggcttggagagaccaaggtaggggcaaagtgaagttagaaagaaaaatgaaagattgttgggtggcggtggctgccaagcgtggtaaacagaaccccacccagcagacaagatgggggccgtgcctcatttccacaaatagggggcaggaggagaaaactgcacattggctggattttttgcttctcagtgccacttactttgcctctatggagactgatattttagctattttagataaagctaatagacaaaagtgtttcaaaatatcctagcccagaaacgaggtacggtaaggcaaagcgcgactcagagaggccttgacaccgagggctgcgatggtgcttttgctgcctgaggggacacctccacagtctccccggaggaaaggccgcacatagaatttcagtcaggtcttctctcttttcttgctcagttaagtgacccattgcatacatcccttttaaaatgtctactttttactaagctgttgcatttgcatttctttggaaatgcccagattattaggatcaaagcaaatgatgacctggtctgtccacatgaggaggcctccctgagagagaatctaccaagacagtcaccagggcttgaggccagaagatcctaagatggcgtgcctagtggcatgggcacacttgtgcctgcagagccctcagtgcctctaactccctactctgcagtagccaagaatgcacccagcggtcagtgtggtgtttgtcttttatcagtgaggagatggagctctgacatgcagccttggggaatgcaaagcttccaggcttgtgagtggctctgcttttaggaaggtggctggacgtggtagaaagagccaggctaatttcaggtggtgtcccagtgctgccgcttcctagctgtgcaaccttaggcaagttacttaacctctctgggcctcagttttctcacctctaaagaaagacttgtaataccttctttgcagagatgtgacaatgagaagtaatgtaatgtgtccaatacatagtagacagccaataagtaaacattgtatttactattactattattacatctcggactgtcttcttgttctcaaaacaggagatggaaacccatggctgggattcttcatttgctttcaatatgttataaagcagcagtgggcattttctccatctgttgcaatccaactcatccctcttctgatttctgggcacacccataccagcacagaaacataacaatgattgcagaggtaggcccgatagtgaaaaagcagcaaagctctggctggtcataggatgactgttacatccaccattttcattttttaaagatacttactctgtaggggaatattctcccgaagtaaaaacatgtctgaaaaaatatatgcaagatgggggctgtgccccatttccacaaatagggggcagggggattggctggatttttttacttctcagtgccacttactttgcctctgtggagactgacattttagctatcttagataaggctcatagacaaaagtttttcaaagtattactttgaaaggaatcagaaacaaaatccacccagtcatcactggtccgggtggccacctagattctgaagccaaagggctattgtgggtgcacagcgactgagtatctaaatgcaaacttcttgaacactaaatctttgctaaaattgctgggaggtgaatgtgaggcaagcttttaagtgataccagtacaaatttttcatcaatggcattttcaccatcagattgtttcgccctccaatcgcctagctctgctcatccaaatgagctatttcatttttcaattttagcgtttctcaggcttactagcctagagatcacatctgcttctgctaagcatcccccagaaacggtcctggggagctctggcttaggtgaataaccactgctgtatttaattttaaattctttgtatttttgcttttgttctttaaaaaaatacatgtaattattgttggatatatacttttccagtcaaaagttacccagcattgtgtcttgtgctttacttagaagggtccagttgccctgagggaactctcttagattagagttgtccaaacacgcactttgggaatcgtttctcccaagccttatttatctaaggcttaggaccttatataggtcagataattgatttaataaataccggaaatagttcaaaataaatttcttagctctgcttcggccaaggctaatttttattaacactaaagtgatggtgttcgtcactttgaacaaacattcaatatggttaaaaaaaaaaattaaaccggtcattagacctgttaatcaaaacaaaatgatcgctttagtcagcgcatgtacatagtatgtcttccggtctaaaaaacaactttaagttccctgaaaacaaagacgcccctgtcacgctcacagctctacccagcacttagcatggtacctggagcagagtcaatgtgcaataattatcaataagaattgttgaatgcactctgggaggccgagacgggtggatcacctgaggtcaggaatttgagaccagcctggccaatgtggtgaaaccccatctccactaaaaaatgcaaaaaattaactgggcatggtggcacgtgcctgtagtcccaactacttgggaggctgaggcaggagaatcccttgaacccgggaggcggaggttgcagtgagctgagatcgtaccactgcactccagcctgggcgacagagcaagattccatctcaaaaaaataaataaaataaaataaaataagaattgttgaatgaattaaaaggtgagtgaatgaaggaaatctagatgttttcatacgattaaattaactttaatggtttatttggtgggtatattgaattggcattgtttggacctttcctctagagaacgtagtattaaacaatgttattttaaaaacaaaacaaaaaccagaaattaaaccagtggaggggacagggcagtttgagtgattagaattatttgaaatgagttgtaaggatggtttaagataaaaccctgccattattaaagttttctggttggaccatatgaaatttccactatttgtttatttcagatctacaaaaaggataatttcatatgattcaactaacattataactaaaaataaagaaatatgctcattttttctgattaggctttaacaccggaggaaagcggaaaataagcaaggctaacactgttggagattgttaactaatgaactaaaaataaactaatgaaaggcatcaggtagcaaaagactggattatagtataaaccacagtatccaatcacccagtttcctcaaaatatagaaagaaaaaaaagcaagatacttactattagtctggtttgatccaggttactaaataaatatttcaggtagccaacatttttctgttctcttagtttgagatattttagtaaagatataaaaatcactgacggaagttaaaatttaattaaaattttttcaaaattcctaccaagccagcccaataatattgcattctcacttctttatattccaatccaacattttttacaagtgtaaaaaattttactatctttttatagttaacataaaaacataagtcatatcataatcaaaacataaaacatatcattaaaaagtttcaagtgctttttttcttaatattttattgtaagcattgttttcatgtttagcctttgtgattgtttttaattgctatgtaagcttccatagcatccatgcatcgtattttcttcactatttccttattgttgtacatttggactatttctgatttttgttattttagctaatcctacaagaaaatctttacatatgtagcttttgttactttcttgggcaaatccaggaatgacatttgaaagaataggttaaagtaaaacagcattttgcaggatgctctagacttctgttgaaaacaatcccatcaaggaaagaaaatgtttctctaactctctgttaccatctccaagcctttgtgtctcctctggagcaggcactatggtggaaggagaggaggctctggagccagaagtcctgagccgccttcccctccccacctcagagccctgttcttcctctgtgagatggcggcaatggtgcctcttcacgcaggggactgtggagtggagatctgattcggaagtgcctaaacacaaaaggcacttggaaagccagaaccattagcatgtgtgcctcagtttcccaatctgcaaaatagaatatcattttcccaatgcaataatgggggaacactggactgacatgctttttttcttcctctgtcattacattgcagtgtatacttgggcagaaatttctctctaggctttagttttagcatctgtgagataaattatgagaggattgaacatcccttttagctacaaaatgagttgtgtgtggtcttgaaattacaaagttttaaagaacatttaatgactcagcccccgatccttaccccaccccacaggtattggctctcagaattcagagcctgaacttccttcttccttgcctctccaaatactttttaaatctgggctctcaccttaccacaatatttttaacattctaagtgggagcctctgctgtgaaaaatccaaggacaaagtccatcccttctgcttgtgcgtcggctgcagatttattgggggccgtgcaaggacttcggttggtgagaacagacttgaagagaaagcaaattactgcccgaagcagccaaattgcagtggtgaaaatgttaggcgtttgcactgtccactttgcttgcctgttttgatttgtgctactcagcaactaattttcaggctcaaggagaaaaaaataaatagaaagcattagaacaaagacaagcaggacccttgccagtccagaccgccgttctctgagtgcagccatccctttacagttgcaaaatgagtttccatgcctttgtttactggatcctcataaccatcctatggcaaatagcagaaaaagcagcaggatctatctcttctcgtaaatgaagaaagtgaggctcgtaggtctggtgacttgcctacgagtagaaccaggccgcaaacatggtttctcggggccctcgtacagggtctgcaccttgaacagtgtgcagccgctcgcccaggtccgtacaccatcatatacccaaagactggattctgaagcctacttctaaaggtattccccttactaagcacttactcttttcctctcaatttttacagtaaaaaataattattttgatgctgaatattctcatttaatatacattttctgctgagtatgaatattaggttattaatatagaactatatgtttttctagaacgtattatgatggttctaaatggagaacttacattttctccaaagctgataaatccatagtttccattttactctcagaaaatgcatctattctggaacttccttagagggatgcgcctcaatttgcagttcaacccactcctgtgtgtgcaggtatgcacaccgcttaccaccccactgtatgcagaggttataagtaaaatgtaaattaaatcatatttgagaggttttgccctgaataaattgcctgtaattaatctgcttggtaagagtggatctccatatggtgtgaaaggttttatgtgtatgagattctctaaaagaacagcacaccgtcacgcacagactctgaattgagatttgttttttcactaactcctccaggactgggagagttatctttgaatgacaaatgtctataatctattcacaattatttacgtcatattttagcctggggttcacctgcaggctcggtgcaggtagtgcaaatccttgtgctgttgactggagcaaagcaaaagatggttttctggtgctcagaacaaatgcatgaagcattaaacagctggagatgtgaatatctgagactcttagtgggccacccccaaagctggctgagaggagggttgggaagaggggaagtattcaagtgctgcagcaggatgtctgtgatgggctgtaggtgctgttgcctttgccaagccatggcaggtggggaggagggctcagaatggaaaccaacatcaccatttaagattaacaaacccctacccccctcttttgctgtagatactagagtctactgtgtcttcttgtattttgctaattccccaccatgcaaaattgtactggctccaagacagaatgtgaatgacagccctcagttagacctgccctttcatcatctgggctgggcatgatgggagagaagtatgataggggaaagagtagaaaagacaggctgggggagggggtagaggttgcaacctgttcccctgggttgactggcctgagctgcctgctgcagggagaaggcagctgagccaggtgacccatcacgtgaaaagcctgagcccaagccccaggggttgcaggtcagtgtgggtgttggcaatgtgcacgccagcatgtatttacccataggctctggtggttgcaggtgtctgtgccccctgtgggcatatgctggcgcatgtggtgctgtgtgtttgtaggtgtgtcctgacatgcatgtgcaggtgtgcatgtgttggtgtgtgtggtgcactgtatgctcacctgtatgctgatggatgtgtgcctgcatctgcagggatgtgtttttatgtgcagcagtgagtgattttgtatgtatggtgtgtgtgtttaggaggagtttggtggcagcaggacagctccatagaaggaagggcaaacattacttcaactcagggctggcagtctgggttctgagtaggtgagcagaaagtcagagatgtcacagatcatgttccagggattctgtggagaagggagacaagaaaacctctgtcggatcatggagaggtgtgagtggcttcttcatagctgcatagacttttcaggttggtctggcctgactcccgtcagaggtctctcatcttccaagtaagcctggggtctttccttttttgtagcttccttcctctcaattctcccgacttagaatgcagacgccactccatcccccacctgcggaaaccctgttcaccccttaattctaagcccagatgtatggggatctcccagacccactgttgacattgttaccagcgttaaagtgacacaagcaggtggaaaattgttgttctcagaattcagggtcaaaaacccaacagaaatagttccctagagtgaggcgttcccagagaagagactcggcacccagatagtttcaggaacatttatctgtcagcggaaaatgtcaacagctccccaaattctcaccagttcttcccacagtgtccatcctatgtattttggctaaaataggcaaacacgcatttaatcttctttttttttcaccctcggaataggttggcaaacaatccaataaggtggttcccaatgacctactttgcccatcaagataaccagatggataatgatttcttttcttttctttttttttttttttttttttgagacagagtttcgcttcgctcttgttgactaggctggagtgcaatggcgcgatctcggctcaccacaacccccatcctgggttcaagtgattctcctgcctcagcctcctgtgtagctgggattacaggcatgtgccaacacacccggctaattttgtatttttagtagagacagggtttctccatgttggtcaggctggtctcaaactcccgacctcaagtgatccacctgcctcggcctcccaaagtgctgggattataggcatgagccaccgcgcccagccatgatttttaatatctgattatttaaaccatctgacaggccacttgacttaccaattgagtaaatatttaccaagcacctctcatgtgccccaaatcaaaccaacagtcctgtagatggttggctcaaccagcccactggccaggccagtgttttgaagatgaaggttaaatgattgagagcccataagcacaagaaagtgtccctggtcccggaaaccatgttctcaatttttgcaaaaaagtctaaatttgtcttcaggctcacttctttatggtctcatctaattttcatcattgtgtggggcctgtgctaatttccatgctgagtttagtagcaaaggaagcatatatggaggataccacccaggacttttgagtcagccaagagagcttcagaaattcctcctttgatttccacagagtcgagagaaatctttgtcttttctcccacttaactatcaacacttcaaagcccagacctacataaaatacacaaatgctttctggacaaaatgaatcttgtccgttttctttgggtttcattgggaacaataaagattgagctacaaaaggttggcaaagaggattatcctttttctttctattaaacatagaggcttcaaaagaacagctcagaaagtcaaataattgtatccaccatcgctcacccatccatctccctgctgacctggcctgtgaaatcccctttaaaaacttagccagctctcacctgcccattgcaaatgctgtattgttaaatgttcccatctataattccatgagggaggctgctataaagcaaactccttccatttcaacggagcatctcgtcgcgcaatagctctttggggtgggagtggtggggtgcctctaattttcaaagctttgtaatctcttgttggaaagggagctacttggaaaccagaaatgggctgtgaatagagttatagccacaagctcttgcagtccaaaggggctggtggggaggacacggagggtaagattttggaagccatttttgatcttcatgacaatttcttgattttgtcggtttggaagacacatctgttagtttttagctatggctgtaaacacaaagtctcagacttgaagctgacctaattcctcgtttggtttcagaccatagcttcctcagaaaattcctgtcagccattttgaagagcacaaaatggctcctatatgccaagagatagagagaatttgctatttagggatttttttttttttaagatagggtctcccttcttcactcaggctggagtgcaggggtgtgatcacagctcactgcagcctcaaaatcctgggctcaagcaatcctaccacttcagcctcctgagccattggaaccataggggtgcaccatcatgcctgactaattttttctttttttgtagatacaggttctcactacgttgccctggctggccttggaaactcctgggctcatataatccaccagccttggcctcccaaagtgctgggattacaggaataagccaccacgctgcctatttagagatttttaaatttggagttgaacatttaatagcagcattcaagtctggaataatttcagttaagaaagaaaagaatagaaatctaaccttctaattggccaaccctctgaaattctatgtggaatgatcaacaaaggaagacagttttgagttgctgggtcctctctacggggtcagaaaagaggcctggttcacctggctctccatgttttccctgtagagtccttcaaacccatggtctttctctaccaactttgaccctgggtcatcatctctctctccaatcaccattccttctctttgaaggttaaaaaaaaaaaaaattcaggccaggcgtggtggcttacacctgtaatctcagaactttgggaggccaaggcaggtggatcacccagggtccggagtttgagatcaacctggccaacatggcaaaaccacatctctactaaaaatacaaaaacaaaaacaaacaaacaacaaaattagctgggcatgatggtgtgttcctgtagtcccagctactcaggaggctgaggcaggagaatcacttgaacctgggatgcaggggttgccgtgagccaagatcacaccattgcactccagcctgggcgacagagcaagactccatctcaaaaaaaaaaaaaaaaaaaaaatcagagggaacatacaataagccatatttaatggagttctgaattatgtaaatttgaaaaaaatgcaatctaaaaattcataaggtctcactatttgtagtattcaagataatgtaagattttacatttattcctatgataaattaatcagaattttgcaaagtctttaggaatgcatctctcatgtaaagtgtagctactttgtagtcagaagtggcctgtggcaatatcgtgattaggctggggtaggggttaggggtgctgccacttagttctaccttcagtgataagaagagtagacagcaagccttggcaacatagcaaaaacctgtctcttctaaaatacaaaaaaaataaaaaagagagagagagaaaatattcgctgggcacggtgacacccccctgtagtctcagctatttgggaggttgaggtgggagaaatgcttgagcctgggaggcggaggttgcagtgagccgtgataatactactgcactttagcctggacaacagagtgagagaaaaagaaagggaaggggaggggaggggagggagaggagaaagaaaaaagaaaagaaaagaaaggaaaggaaaagaaaagaaaagaaaagaaaagaaaagaaagaaaagaaaagaaaagaaaaaagaaagatggcgtctctctgggaagattttctgtgaccagagtgggactgggctggtatgtcagaatctcggaatatttgacctggaaagtattatagataccttcaagttccacttctggattttaccaggggagaaatgatggccctagagaaaaataatacagatcaagaaattgccatgtcataagcaaatggcaaattcagcccttaaacccaggacttttgattcttgctctagctgcctgtcctctgggctgacaagctgccctgttataagtaaatggcacttctggagccagccacttgggtctcaggtgtgtgtgatgagaccctacactagaatgacagccacaaaagagctgcaggtggctgggccaccttagctcatcctgtccatgaaggggatggctttcaactgtttcagggggtacaaaaaggcattggatcatccccacagtgaggaaacccctccccactccccctaccagatagctgtcagtgctgctgagaagcctaccttggtctccctccactccagcttctgcaggccaagtggccattgttgttagattttttgccctgttgtgccataggccctgacctgcctacctgctgggcaacaggctgccggagggcgaggggcagcccttgtgccttgccccacatgagctgcactcatgctgccttccagagaagatgaatttagccttccacctgaatcctttcagaaacgaagcaggcaggcaggcaggcagcaagaaagctatagacacacacatacatgcaaacacatacaagtaaatttagccagagtgcttttagtctataaagatgttcagtaaaagtttaatgagtgaagaagtgacaaaaataccatgtattattagtatatctaggctcagacaatgtcttatggtatgtaaaccgtatctcaacaacaacaacaacaaaaaaagctactcaggaggctgaggcaggaggattgcttgagcccaggagttccaggctgcagtgagctatgatcataccactgcagtctaggctgggagacagagcaagaccctgtctctaaaaaaagaaaaagaaaagaaaatgtcagctatgtacaagggaatcttcactcaccagaggaagcccttggaaggttttgtgcaagagaatattataataatatgtaaatataggtagaatatttaaagaaaagctgtcgtgagttatttggtattgtgaggactcttcttctaatctacttgttttcatgagtatgaattttcatttattggatttttgtagaatcgacagatatattaacttttcaaaaatagagacgtgcccagattttcctgtcagttgttcaccaacggatgagatcccaaaaggtaggcaagattgatcgctaggttttagaagggtttccttttaagggctttttaatgaagcccattctaactgagattcccactgccccactgccctagcgtcccgttaatgacaaggagaggcagataaatgcctctttgtgccaataaatcaatggcatctctgcttctctgctgggactgtccaggaccatggtaaccataaggacagtgacccactgatcttaggccttggcaggcaaactagcctttactagtgatggtgtgtcctgttaggctatgccagctggggagagaagactaaaaccaatgagagaaaaacaagtaattttcctgttagtgaagagtgcctgttttaatcatacatttcatcgtcagaaatattatcagagatagaaataaaatgcagaacatagctgcgcattaattcactttcagtgtattttctgagcaagcgattgtatgtcagcggctgcattacagttgctgctctcaaagtactcacatttctagaggagagggatatgcctggctggtaaagtgatagaggggtggtaactgtgaacacttgtgatgccggggcttgttttatgtgctgtttgcatgcattaggtcaactaatcctgtggcacttttattgatgtccccacttgataggtggggaattcagccctgggggtccatggctagcaggagcacagccagcctttggccccaggcagcctgccctcgctccccccgccatgaaccgcattgcctatacacagcaccccgggagcccagaggtaagggtctccctcatatttgcttgtcacggacttggagggaggagttgaggtttgtctgccacatggagaagggaattagcaaagggaagatctggtggtaggaataggattttctgccccagaaaaccaggaaacaccagccgtgactctaatccctaccccatccctgaaactcacttcccaccctcaggctagatgaagaggcgggggtaggggggcatggcctttggcaccctaaccggtagcctacccctcctccaggccaagtcctcacctggccccatggttcctggtcccaggcagaccctgttgccacctgctcagatgtgtcacccttccttgtcccaaggacctggctcctaaacaatgtgttcagtgacgtttataacaaaggcactcttccccaatctatgttcagcaagatgttaatactatactacaaaaaagaaggaatgtacattttggaaacagtagtttaagtgcactgaagaagggttttgtttgttgttgtttaagtgcaggacttttccaaaacttctgtctgcaaatgtgcattacacgttcccagggggaagggaggaagatagagttatgcaatgcaatggaaattaatttcacccctcttggcatctggtttttcagggaacacctattaagtgacctgcagaatacagagtgagggctctaagaggaagttatgagaaagctgggctagaggattaaaggaaagcatcctgggaggtaggatatgaatgggtaggatttaatgcaaaaaggaggaggaggaaactttgcaattcagggcatggcctcagcctgatgacaaatgccccagggggacctcctaaagtcggttcattttgaataccggcaggagcagacgcaagctgccacccctcctgtgtaaggctgaggtagctgttccacagtttcctgggacttgccagcaggatgaagttccagttgttaaccacagtagctaacctcataatgattccttccttcacctgcctcacttcccatgttcttactgtattcatttcctagggctgccttaacaaagtgccacaaactgagtggtttaaggagcaaaaccttattggctcacagttcggaaggctaaaagtccaaagtcaaggtgtctgcagggttggttccttctgagggctgtgcaggagaatctgtcccaagcctctccccagcttctggtggttgctggcaatctttggtgttccttggcttgtagatgcatcatcccaatctctgccttcattttcatgctgcattctccctgtgtgtgcatggctgtctctgtgtccaatttttccctttttataaggacaccagtcatattggattagagcccaccctaatgacctcatcttaacttgataatctgaaagcaccctatttccaaataaggtgacattcagagggtgttaggacttcaatatcttttgaggggacacagttcaacccataacacctaccaacggtttctggaatcatctctcaaaataaactatctaaactctaatctttgtttcagggtcagcttctagcagaactcaatgtaagacacccttttaaagatggtacctcagaggtacagacagattgtgaaccttccctagcacagtgtaacaagtcccttgcaaaaatcctgatttgagtcaacattgtaatttcttgcttaaatctaagaatatgcctcccagcttcttccaagactatctgggggagttgtttctagggtggctcaatttattcgttttgaacgctgatggccgtgcaccacaccgtggctcaatgggtgttgaggacacgttcacatgcaataaatgcacagggctttgccattaggtggcattaggggaaggacacttccagcatactgcagaggcattctcttccagcctggttgcctgtcaagcacctgctgagatgactggcccagacggagattgtggggttgctgagccagccctgtcccctccttatctccggaagatggaataaatgcgtgtcagaagggagggtgcctcccatctcgggagcaccggggttgcccttcagaaaaacattgcctgcacattttgtagtcttgaaatgaatctgagtggcaattcaagcgggcagagcttgttttggattttagacagttctacctgcgtgctcctcttctctgctccagctctgacatctcggctccacatacagtggtctgaagtggcatacggaccctgagaagaggagaggcaaaggtggcagctgtggctggcccctcctgccttctggtctccttggctggtgagggaagaacaaacacagttgtgtttccaggtcacagctgccagggctccacctgtggggtgggtggctccagttctgttctgagttaagaaatgctgcaaatacgttctccttgaaagagacactaggaattgaccatttctttctgcagctttctgtagccaataagcatttgaggaactggagaagggttcagccctgaattgcaagggaaaactgtgtgagtgtgttttagttaagaaaaaagttaattctagtgagacctgcttgtttacaaaacagatgtataggccagacagatgtacagggatgaccttgactttcttttgtcattgcaggaaggtggggtatgtatgacccctggttaagaacaataggaggccgggcgcagtggcttacgcctgtaatcccaacactttgggaggccgaggcgggtggatcacccgaggtcgggagtttgagatcagcctggccaacatggagaaaccccgtctctactgaaaaaaaaaaatacaaaattagccaggtgtggtggcatgcctgtaatcccagctactcgggaggctgaggcaggagaatggcttgaacccgggaggcggaggttgtggtgagccgagatcgcgccattgcactccagcctgggcaacaagtgcaaaactcggtcaaaaaaaaaaaaaaaaaaaagaacaataggatcagaagtcggatggctgggtccatatatacctccacctcttctgactcccagttttccatctctgtttgaaaatgagtctgtaagcctctccccacctctgcctgttcccatcccatagcaccaggctgacttaggcagccacacagctgggatgggaagttggcctcagtgagcagatggtacaggggctgagcttaaaacaaaaatcacaaacatttcttggggggtatcctcaaggccgataaccctcttactagagtgaaatggaaaaccaaatgtgattgagctgcctgagcgataaaagcatttgctgttattctctgatttgctctgttcatggagagtttagtcataggagtttctattctcagaaactcacagcacatcacaatacgtagctcatttgtcctcaaaataattctgccctgcataaatgggtgtgtgtgtaggggggtggtaattataagaaaccatgtgtgttagaattgatgtcagtgctttgagatcatcagataaaagctaataaacaacacatatgtgtacaggccacctctctaattcataccagaagcgctggttgtaatcaaagcatggcatattttattttaaactattttataaataacctttgaaactgtgttgattgtgaaagccaagatctgatgtcctgttaaggaaagatgaaaataggctagaattaaagagcaatatgagtctggataaaagtgacaggaattactgtaggacaataaagcattgggtcatgtcaagttttcatcacatggagaatggaaagctgcatcataaatgctctccacctaatcatcctgagcattctcattttagtgcgatatattgtcctcttggaagcaataatctcatttaggtcatgagtaaaataagttgggttcagcgtttccatttcaagatatagagaatatttctccagtgcagcataagaaatagaatatcacccaggagaagctttacataggcagtgataatgtggaaaaatctaataaagagaacccacgtgccccagggaggagaagccctctgtgtgtgtgattgtcgtcaggtgagcagttatggcacactttgtagttttgccagtgcttttatgtaaattactgtatgcaaaatccacagccctcggggatgtgtgggtatggcctctgttactgacagaggaactgaaacttcaagaaggcaagtgatttgctcaagattggttatcagtagagttggggtttgaattccattcttctggattcaaatctaagctctccctctgcacagttacatgtgggcaggctgtgcatgcatatctgtggcctggaggagtggggtgagtaaccttacaggaaggaataccctgcactaaaatttgcacctaagcttccattattacgcctacttttcattttctgtttgttttcctcttagaggttaaattttccattcctgattttaacccaaagaaaggctaagtaaattccaggggccactcttgaataagggcagctggaaaaaaatacacaatgcccaccatctagcttaacaggatgtggacaccttcagtcgtggctaaatctatacagtttaaccctagcaacaatttcccagaaataaaacagctgctctttctggtatttggttagtctccagctgggtcaagtccctcttgatcgaatgcttggagcagggtttctcgacctctgcactaaaacacctggggccagataattctctgtggctgtgggcaccagggaggctgttctgtgcattgtagaatgttgagcagcatccctgacctctacccactagatgacagtagcactccccaagttgtgacaactcaaaatatctttagacgttgccaaatgtttcctgggggcaaaatctgcccctggttgagaaccagtggattggagtcatcatttgtgttgatcaatcactccgtgatgattaggccatgatggacaattcaggctgactttattttgctcattaggttgaccagaagactggcaattgatccactgctaagcactttcctgacacaagctgaaatgatgtcctcaggagccccgtgtgcgcatggcttttgggatggttcttcccaaggaggacagccgtaaaccatagaaagcaaccacttgactctgggtgtccctggtttgcaagtgcctcttgtgtccgccatctgcatttctgtctagatggtaaggttgagggaggtcagtttcagcagaaagtgcaaagagcatagattcatgaggcaatcagacctaaattaaagttttggctttatcactacccagcaacgtgatcttgggcaggtttcttgacctctctgaaactgtcctcttctttataaaatgaagattacctaccttgcagggtcattgggataattaaagaaaatgtgtgtaatgggcccagatggagctaggcccatagcagcactgtaataaatgttttcgattactgtacattttacaaaaatgaatgactgaatggaaaggtagaaaggccaaatagagtgtctgaggcatctccatggaggagggtgccagtggccatgtctgtctgtggctgatcgcaagactcttttgacagtccctgaagcctgtgctcatcttcagctcccttgaggccctcttcacctggcctcacccagtgtccctgctcttctgactcctgagggacctgagcattccaaaatagatgttaggaagatgtggattcatgtagaaggatgtcaaggcattgttggttttagcagttgatcttacctggggtgtgaaagacaaccgaagtctgtgagctgcagtgatagaaatgtgagcagatgggcaggataggaaggcacttcttgacgggagcagcaacagaagccactgcctttggccaggactgggggagacacaacagaacaggactggcagaagatgccacatcccagggtccccaagaccaagctatggcaccatcacccatctacagcaagatctgtagcaggaaccagggagaaaagtctagaccctcagtaaactatgcggccaggacagtccgaggtcaagccgtaaaggaggcttttttggcatcttttttcttctcccttgggcatcatggaatctgtgctgggtaaagaaccttggagatcccctttgccttgactcctttgtttcactggccctcagaaaggagatggcagaatcacaaagctggtggctgagccagaaagatattgtaggtggaattcaggttatggatagggttaggttccccttgaagagggagtactgagtttgttccttggagagtttgcggttctagctctgtaacccaggactgactctcagcccagtgctttttctgttgtgccaggatgcatcctcatcctatatcttattttaactcatactgtttccaaatcaaataccaacaacatttacaacctttactttcttatttatttaatgctccccctgaaagtagtaatttgccactaagaaagcctcccctgccctagaatactaaagaaaacgagaactaagcgaaagaggacctgtagtcagcgatttcactgtatcctatttaaaatgaaatggactttattttctgctttgagaacctaaaacaccacactttaaaagatgatatttatcatatcttacaaggtcaaagcatacttattggggaaaacttggaaaaggtagaaaagaacaaagagaaaataaaaatcattttaaaaaatgttacccccaagactgattagtatgttggtgactgtccttctaggcttggatatgtgcattttatttcgtaactgttctttttacttagcaataaatcatggtcatctctccctgtcatgaactatgtctctacatcaactttagtgcctgtaaaatgccgtaatttattttaccactgtcttttgtcagacatttagatggcttcatgtttggacgcattatgaatagtgtcactgtggacattcctgtgcatacatctgtgctcacatttgtggctatttctttggaatgcactcctggcagtagggttgctaggtctcccctcactgtcagtgtccccgctctccggggcctgcttttttcatcacccgcctccccgtaaagattcctaagttccagggctatctccttctgatggagatctcctgggtgatgtggtacacgtcacccacacccctgccaccagcctgctgtccaacagatggagctgataaccatttaggaacaatccttaaacttctaaccgactcagtccctgattagacttcttgtcttgccttatccctggttatgtcccttctccctcccaacccttacccacttctcagccccatgcaggaggcccagtttgtcagctggccttgctaatttctctcttggcccagccagagatcgtctaggttccttcttcctactctctgcccgctctgtagagtcagactctccacgggatggagatcttcaaggccagagagatgcaaaacctccttgcttcaggatccggagacaagctgctgcttttaagcagatcccctctcaggcaggttcaagtactgacccaaagagcaggggggttgcagggctctagtgattcttgtgtgaccccagcagactcaagctgttgcagcagtcagacatttggtgatacctacaaaatcatctagtccaacctctcttccaacagaactcacactcgatagcttctttgatgaatggaaatccagacttctgggaacactactgtgatgagcaactcactacctgcctacctacctaccttccttccttctgctttatttcacaattcttgccatacaaaatgaacaaacacacaaacaccactactaatgctattcattcatttatttattcaaccaatatttattatttactatgtagcaggaacagtctaggtgcttttgaaacaatcatgaacaaactgaaccacagcagcaacaaaatcccagatcccatatagaactaacaattaaagacggagacaggcaataaacgaggtaaactgaaaaatatgtagatagttgtgatacatgctgagaagaaaaataacacagagaaggtgcataggaagtgtcaggctggtggtgtggggatacagttttgggtagggtatgcagggatgtccttgctaagatggtggcattctagtcaaacccagaaggaagtgagcgagcaagccaagtgggaacctggagaagacggaggtggcagtgcagactggcatgttcctggaactgcaaagaggtggtatgagtgaggggaaggccagtaggaggtgaggtcagacgtattgagttctgggggtttggggagagagtgacagttgcaaacaagcttgaaggacattttgctctaagtgagatggaggtcaaggacttggagcagaaaagatacatgattatatgttttggcaggatcattctagcagctgggcaaggaacatgctgagggggaataagggcagaagtaggcattacttagtgatgtttgttcaagaaacatctgttgcgctcctatatgccaagcactgcgtaggtgataaggattaaacgggagcacactcttcttccctctggtaggttactgtaacaactactcccacctctgtcatttatgagtatttacccagtcccaagctctggggtgagcacacccgtccattattgcatttattcctctcagcaaactgtaaggtaacaacctcaggatatcctcattttacagttgaagaaactgaggcttagagaggttatgtaacatatcgtagaccacatagatactaggtagacagccaagatttaaacccaggactgtctcactccaaagcctgcaatactaaccacaatgctgttgctggaaactttttcttacgctggactttgaaagttcacctaagacagcatgagaagtgatggtatcttccaggcagccacctgggccaccagccctcccctccttgggatctgccttcccactttgtctgaattgagggtccaacactgctcctcggacacaaggtccaggtggggagagaacagagtccagcccagccaaggcaagtcacctgggctctctggaacccggactgctttgctgtagagtaaagtcctggaataggtctctaaccctctttccagctctgaaatccaaggcgtatgtgatctgaggtaataattgtcttgcctctcatgcttggtttttgatgagaccttcacattctttaataaacatttatctgtatccaggaattataggagatacaaaatgccgaggaatgcactactcatgatcttttttgatccttttaacaatccagagacatgggctgtgtaaagccacagtgcaaaatacaattaggaaaacacagcaataagaccactgtagctttgaatggtgctgttcactaattattacctccccacccattttctcatctgaccctcacagcagccccatgaggtcgacagggtgaggacattatccccatatcacagatgggaaaactgcagcccagggagctatgcgatttctcccgaggtcctcctcacactagtgtagtggagccgctatgtttattgaccccaaatccaagtcaacccaacagtctctagaacgttccaattacctggccagtcctcacttagataacatcggactctttcagaaaagattaaacaaatcctctatttgttgacagaggttttgctgaactggccctggggatccgaattgatcatggccatcaacacaggcagcaaagacccttcagaagtgttttattcactagccacctccatcccccaaccctccatcgtctaaagtgtctcctgactcagttctgtccccctgcttgtcctcttctcctattagctctgggtacccagtccagatcatagccccaagctctgtcatcattttgcagcctccagcctcccccacccaactcagcagagccctgagaagaaagtcctgggtcccggaggctgcacctgcagacacaacagattctgcaatggtgagagcatatagggtattttgggtctccagtggggtttttgctgattctgtgcctgaccagggcacatgcttcctggaattaataattctagataaagaagcctagcagatgcccacctatggaaaatgcttcttaaataagaagaatctcagaattaggaggccagcttcttgttctcagcactgcccctaactagctgtggggcctcggacacgtcacttgatgcctctggtcctgttttcttctgtacattatggaggatttggacagagatgatcagtaaggtcccttctagccagactgtcaaggttcaaatcctagctctgccacattccagctgtgtgatcttggacaagttactttatctttcctaagcctcagtatccccaactataaaatgggcacaatagcacctatctcatatggctgttgtgaggacccaaagatacaatgaatgtcagccctcagcacagggcctggcacagagacagtgctcagctaagtaactgtttctaagttgtttatgatttgaagctaaggatagagatgcttattctgagaagcagaaaggaacagatggagaaggaaaaaggaagatgggacaaaaggagaaaaactggccaggtgcggtggctcacacctgtaatcctagcactttgggaggccgaggctggcggattgcctgaagtcaggagttcgagaccagcctgggtaatatggtgaagccctgtctctactaaaaatgcaaaacttagctgggcatagtggtggacacctgtaatcccaactactcaggaggctgaggcaggagaatagcttgaacccaggaggtggcagttgcagtgagccgagatcgcaccactgcactccagcctgggcgacagagtgacactgcatctcaaaaaaaaaaaaaaaaaaaaaaaaggagaaaaattagggaaaatagggcaaaattgggggtggagaaaggcaggaaaaatttgagggcagcaactgcaataacttcaacagaaaagtagaacaataagcatacagccccaaaatactcagcccctttcctgcctccccttcctctctgcccctagcagacgccatgatagctcctggaatgatgccttttataactgtggggcatgttcctccaggctgacaccttctgggggggcccctgaacacagcatgggctcagccttcctcccacacacctaccctggtaggcatccctttgagatggatctgagtggtttcccacctccttctaggggtgaactgtcagttcaagaaggaggtttagggggatgggatgtcccctacctggggctaatcggggcttgggaggtggcttacgaatcgaagccgaagacagcagcctacgtgaccagaaaggaaaattcccctccctgctagttaagaagcttcacagaagctcaccagactgttgttttctttctttcttctttttttcctttgtgcacacataagcgtctaaattttgcaaactgttgcctacctttgtctctgagagcagtggaaaatattggactaacaaaaataagcaacagccagtgggagaataatagagaggcaaggtctcctggtctagttggcgccgcaggggttaagcctttctgtcggtgaaacaggctaacagcaccccctgagcctgctgacctcttccggctctcctggtccttcacacatgtcaactgtgagcacgctccaatactgacaagactgtcttacacctgaggcaattttcatagcacaggctgctaatttttcctccaggttttttgtttgtttgtttgtttgcctggtaaaatacacataacataaaatttaccctcttagccatgtttaagcgcacagttgagtggtgtcaagtacattcatattgttgcgcaaccatcaccaccatccgtctctagaattcttttcattttgcgaaactgaaactctgtacccatgaaaccataactccccattcccgcctcctcccagcccctgacaaccactattctactttttgtctctatgattttaactactttaagtaactcatataagtgaaatcataccatatttgtctttctgtgtctggcttatttcacttagcctaatgccctcaactttcatccatgtggtagcatgtgtctgaatttccttccttttcaaggccaaataatattccactgtatgcatctgccgcattttgctcatccatccatctgtcaatgagtgcttggttgcgtccaccttttagtgattgtgaacagtgctgctataaacatgggtgcacaaatatctcttaaagaccctgctttcaattcttttgggtatagaaccagaagtagaattgctagaccatatgatagttctatttttttttttttttgagatggagtttcgctcttgttgcccaggctggagtgcaatggcatgatcttggctcactgcaacctcccttcctggcttcaagcaattctcttgcctcagcctcccgagtagctgggattacaggcatgggccaccatgtccggctaattttgtatttttagtagagacagggtttctccatgttggtcaggctggtctcgaactcccgacctcaggtgatccactcgccttggcctcccaaagtgctgggattacaggcatgagccactgcgcccggccagtagttctatttttaactttctgaggaaccaccaaaccgttttccacaacagctgtaccattttacctttccgcccacagtgcacggcattccttctccacatcctcaccaacacttgtgattttctgttttttaaacaagtagccattccaacgagtaaagggtgatataaattttttaagaggcaagacgtgccaaaactaggatttcaaaaattgtaaatatagaataaaatagactattttaaatgtgacaaattaacaaattaattttagcctgcttatatgagttctttcaaagataatttctttttatttattattattattattatttattattattttgagacagagtcttgctctgtcaacccagactggaatgtagtggtgtgatctcagctcactgcaatctcggcctcccatgttcaaacagttctcctgcccatgttcaaacgattctcctgcttcagcgtcctgagtagctggaattataggcacccaccaccccaccaggctaatttttgtatttttagtagagacgaaggctggtctcgaattcctgacctcaagtgatctgcccgtctcagcctcccaaagggctgggattacaggcgtgagtcactgtacccgaccttcaaaaataatttttttttcttttttgagacggagactcgctcttgttgcccaggctggagtgcagtggcgcgatctcggctcgctgcaacctccgcctcgcaggttcaagggattctcctgcctcagcctccggagtagctgggactacaggcgtgcgccaccaagcccagctaatttttgtatttttagtagagatggggtttcaccatgttggccaggatggtctcaaactcctgacctcgtgatccacccaactcggcctcccaaagtgctgggcttacaggcgtgagccaccgcgcccggcctcaaatataatttctaaaggaagaaagagatagagaggggaagatagaaagaatgagagaagaaaaattaagaaagatgaggtcagatgacggggaaggtggagaagctttgcaggcagagtctggaatactgcttttggaaatgtgaggccaggccccgtgccttccaaatgcacccgatctttccgccgccgtaggtcccggatatatggatttgcttggggacattgcttgctttcacagggaggctgtgtactagcaaggacacaaagatgagcgctccacagttccctatttgggccagaaggtcaaaaaaaggggtggggtggtgggggggcacaggcagctaaactggctctgcctcctggggccaaaaggccagcttcctccctgggcctggctgcccagaaacctcggcgcgggcacaggtcagaggccgaactgggtggtattcaatcttgggtttaatgcattttaaaaactgcttttgaaggcgcaaatgcatcacagttctttcatttcagggaaaccgcctgtgagaaagggggaggtggggaaaacgctgagcccaggagggggctgccctgggcttttgtctaacaaagccgcagctcctcagcagcggggctcttgccctttgaaaaccaatcgggcaggaacccttcagcctcctttctgagagccagtcacatcacattttacagatctcagaaaagtgagccaagtccctgcgctatgtcactctgggtttgcgtcccatgtctctgacaccctgtttttctgagcaaacagcctctaggtgaacaacagtattttgcttctctcatcactgaatagggtcaaacttcccatggaattccactaccaaaccagatgaatagaaagaaagctgagagaccactaaatagggcattgctgctatctcaatgagagtgtcacctacccacaaagcaggcaggaaatctttaattaaccctgtttctagacacaaaagccctcaataacatttcatcctatttaaataaatattttcaaagaaggtgatgtgggaacacttttatttttgctattggagtgctaatttaatatcatatatagtttaaattatcatataagaacctataagcagagtttggggtggggaaggggggttggatccttctaggaactctcctttatctctttcatttttattccactgtgacacttccctcttgggaaattcctgccccggatttttattagtcttttgtctgctgtccggtgttaaaacctcacaaatccattacgtgcttctcggcgctgcctttcaagttacctctccacgaggtgtggactaatgaatcaaacggcaagggaagcagctgccctcagccctctcagaagaggcccggcccacagccatccttcagaaaaccctcctggcaggccctccctgggctcagcacaccctcgcttccctgggtttttattcggagctgtctgagctacaagaacatactcacgtacgtggcataaaaacacgcacgcacatgcagaaagggaaatacttgttgggctccatcagagagaatatttttcaaaaatctctcaatattgtcattatgtcaactgctaaagattccctgcttgacaaaaacttaatcaggcttccaaactttctcctaggcccatctgtgtactttcttgcaaaatccaggtttagcaaagaactctgcccagttagttgagcacaaccatcaaccttcaatatccggttcccctcagtgtctgatcagggtcctcatcccactccatcccccaggtgaggtctgatccccctggcctgtgttcagctagagtcctgttaggttggtttagccagaatccctctcactctttttgggaattttctatccattgaccccctactctgctccttggcataaatgcccacttgctgtacttggagttgagcccaatctttctgtcccactgcaagaccccattgcaatcatccttatacctatcatgacagttttgaatgaagtctgccttactgtgctttaacaggtatcattgaattatttttctttaacacatcttagcagtaaaattatcttcaaaattttcttagaatgtatgatcatcatctcttatagctgtatcctgatttccactttacaatagagtgctcatattatcatctcatttgtgcctttaacaaaccttttggggtaacaattgttatttccatgtgatagctggagaaactgagtttgaatgagttcctcaggggaacacagctagaaagtagtattgtggggctggcacacagtggctcatgcttgcaatcccagccctttgggggccgagtggggaagactgcttgaggccatgagttcaatactgacctgggcaacatagtgagacccccatctctacaaaaaaaattctaaaaataaattagtcagatgtggtggtagatacttgtaatcccagctactcaggaggctgaggcagaaggattgattgagcccaggaatttgaggccacagtgcacagtgatcgtgtgccactgcactccagcctggacaacacagtgagaccctgtctcgaaaaaaacaaggtagtgtggtgggagtaggacccacacttctcactgctagcctggtactcattctttttgataatgctgttgtgtcatgaaatggcactcaattagtgttgttggaatggtgggttgtgcctgcctcatagactgagatcggagcctactttggtcagtgcctccagtaaggttatgcggtttaagcattggatggaggtgccaggctgaggctgccagtgggtcctgggacttgcctgtacctgctccctggcagtgtgggtccagggatgcccacctggaggaaggggcatcagctggcctgaacctgcctgccatggagctgccttttctttcttcgttttttcttttgtttgttttagatggaatctcactctatctctcaggctggagtgcagtggcacgatctcggctcactgcaacctccacctcccgaattcaagcgattctctgcctgaacctcccaagtagctgggattacaggcgcccaccaccatgcctggctaatttttgtatttttagtagagatggggttgcaccatcttggccaggctggtcttgaactcctgaccccgtgatccacacacctcggcctcccaaagtgctggaattatagatgtgaaccatcacacccggccgttttcttcctttttttttttttgaaatggagtcttgctctgtcacccaggctggagtgcagtggcatgatctcgactcactgcaacctccatctctggggttcaagtgattctcctgcctcagcctcccaagtagctgggattacaggcaccctccaccacgcctggctaatttttgtgtttttagtagagacggggttgcaccatcttggccagactggtcttgaactcctgacctcaggtgatccacccacctcggtcttccaaagtgctgggattacataggcacgagccaccatgcccacccagagctgccatttctaactcacacagaggtatcagagcagcttgcagtggcccgcataagtggccagagctctttcctgggggttgcagggggtttctctgctgacccctcagcaggcagcaagccccataagccagagtgaaaggatgtggtagcagaaactggcctctgaagcgtgggaaacagatctgcttgccgtcagtggcatgcctgccaaatcatgctatccgcaaactcgaggcgggccctggaccggcggctgggcctgaggtcatctgggctttagtgctagttctgctgctgacactctttggttttatttttttcagtttacaaagtattttcacataaacagtctcagctgatcttcacaacaacactccgaaattgtccagtccctcgattttgctccagtgctctgagaggttaagtgacctgctcatgtcccgcagcacttcctctccctccgaggccagggcactttccccagagttgcctctctctggctgtggtgattcgggcaggtcctgtgtcccttctgaatttgacttctcatttgacaaccgagggggctggtgcaagaaccaaaccagtttcttgatcttgtgatgaaaacatgttttctttccactcacttttccatgttgctaatttctttggcctgacaatgcctgttctcttgctgtcttgagagcagcagagctgaggccacctgcccctcggagcatggtggtgtgtccttgcaggggtcagagtggtgtgtggatggcagtgggggccgtggaaggaggcttctggaaggcggcccacaatgactcttaaccctcccctccccagcctccagtcgttttctttcagttaattacctggttgttcaacctccttggcagctccatagtttctttccccacccccaacatccacagccctcttggtctcagagctcagccagaaggaggcagagagtaaaagtcatattgttttggtgggaaatagttaagatgaattatacccaccattcttggtgggttggatttggggctggtgacaggactgaaaggagggattcctgagcttgtgccccttaatttacctcccaactgccctggcgtcaaccacctagtaagccatgccgggataccctccccacgggagcctagcacgccagccagcatgctgacaaaaggaggagtaaggcagctccctaatctcaggcagctctcagtgtttcaggaaaggcaggtgtgtgagtgggtcgttttcctgggtctccctcaatccacaccctagactaggtttttgcttctgcttccacccccactacaatccaagatgggagcttccccacccaaaaacaaacctcagcctctccactttgtccttctccttctgcaatgtcaagcggtcaggccatcccattcattcattcactcaacaaatatttactgagctccccagacgcagcgccaggccacagcggcacagggacagagctgtgagcagggcgtgcaggggtctgtctgctcttggatgggctgagttggctgctctccctgcaagctcccttttcattttcaaatgccccccttagatcttccaataggtccacagaaggcagaaaagaccccaggtgagtgtgggttgtaaccaagtgaaggagtccatgccatctgcatccatgagggtgtgatgtgcctggttgtccctcacaagggggtgctgaaggatggggactaaaggattcaggacagggccagtgtttggcctgattgttatttcctgggttccctagataccaaatacctgggttctgccaatgtgaggctttcacctctgaacagtctggcagcagagcagcagggaatgagcccctccctggacagccaaggaccaggcagtccctcagcctcagtctcctcagctggagagtcatcccgcctggtttttcttctgaggttgtgagagacaagtgaacctctaaaagcccttctcttttttgttttgttttgtttttgagacagagtctcgctctgtcgccgggctggactgcggtggcgcgatctcggctcactgcaacctctgcctcccgggttcaagtgattctcctacctcagcctcctgagtagctgggactacaggcacgtgccatgacgcctggctaatttttgtatttttagtagagacggggtttcatcatgttggccaggctggtctcgaactcctgacctcaggtgatccgcccgccttggcctcccaaagtgctgggatcacaggcgtgagccaccgcgcctggctgaacagggctcttaaaatgctcctgccagagcaatccagacagtgcctcctcctcctccagaaacttgaccttggcctctgggctcccaaaggggaagggtgtacagaggggacttcagggagctggagaagcccctgctgtccttgtgactgagatggagctttaaggagcccccacaacacagtcagcctatagggaagaggaggaaacagagggaaggaagatgggcagggagctggtggtgtctgctgattgggggtaaaggaagtggtctctaaaaggccaaattacccccagagaaacaagaaaggaacaaagggaggactcaagactctgcctgtgtggggcacgaggaatgaggcttgagagagctgtgatctcacctgcgattttgtattctccactctgcctctgaaccccacggcccccggcctggcccaccattcaggctccccagccttgactcccacacggcaccagcggtggcagagcagtgggacacttgctgtgggcagtctgggcagcctctgttcaggaagcctcctgctaccactgcagccagccaagtgggcaagccatttctcctgttcctccggaagtggctaaggtgatgtgtgctggggagggagtggggaggggaaccccttcttggactcagtgcatgccctgggttcaaagctgaggggcactgctgcaaaatgctgtgcaaatataaaatcctttcatagttattgtcatcgtcatcactgggcacattgtgccacctcccagagcaggcactgccctgcaggtgatgtggccttgctatcttatggaagagctcctctaccaactagctgtgtgacctcaggcaagtaagttaatctctctgagcctctgactcctctatgagatggggagagtgtggcctattttctgagccagttctgaggattaaatgaaataaacatttataaccagtgttaggaacataggagatgataataaattccagctcccttgtgggaaaaactagcatgaatttttaacaaaatatcagaatcttcaaggttggtgggaaagcagggtagggagggggagggaggctatttttagggtctagataccaccaccctgagaagagccctgattttcttcactggacactgtggttgatcaactgaagtcattagcatattggttagctcactgggtgcggtggttcacgcctgtaatcctaacattttgggaggctgaggcaggtggatcacccgaggtcgggagtttgagaccagcctgaacaacatggagaaaccccatctctactaaaaatacaaaattagccgggcatggtggcgcatgcctataactccagctactcgggaggctgaggcaggagaattgcttgaacccaggaggcggaggttgctgtgagccgagatcatgccattgcactccagcctgagcaacaacagcgaaactcagtctcaaaaaaaaaaaaagaaagaaagaaagaaagaatattggttagttcctttgcagcccagtttgtgtggttactggatcagattaggcacctcagagagggccaaaaccatgagccaaacaagggcttacccagaccttccccctccccacattttagtttttcacccatccttgaatagacctgggctctgtcctaacaggctgtggtagcctgggccggataaactaccctcacctcatcttcccttcccagggtacgggcagcccaaggcctctctcccaggtgaataggcacacagccctttggatatttgtccagaaggattccttaaggtcactccatggtcctccatggtgctggaggcccgaggtcccagcctccctagaagttgttgctttcatagcagctaggtttcccctgctgtggagtcacggttctccactcttagaagtcagtccctggccccagccagcatgggctttgcttctggagaggctgaggggagaaaggaagggagtggcaactcttagtgcagaagtgtgtttggaagacacccagagaggaaagacgttcactccaccccacccccacagaggccagggcagattcagaacaaacccaggcaaagccctgaagaagctgccttgactctcaagcagcctcttggctgttggtgagggaagacccgccttctttcttgatcatcagagtcttgtgagcaccaggggggaatttatgggcctggtagctttaggttcagaaaggtcactgagaaaggagatgccagcttgaccccttcattccagagcacccagggatggcgttgtctccagtcgggtggtgttgggggctgaacctactgtgggttcatggtcatcctcaggccagagaacttttcacaggacctagaagacctatcattcatgctgagacagttcagaggttgagcctccttctaagagttgtccagagggtaaaaagaaaggtccccagaagtcttggttgagaggcagaagagggagtgggcaggttcttaggcagggatcacacacagtaaaagatacaggcaggtcctgctgcagaaggccccagatcaacttggtcagaggcctagagtcctactcagcacccaaccttgggttccatcgctgcctgccctgggcctcagtgtgtcccctttgaaatggggcagacaggagtccctggccaccctcacagaactgaatgcagtgacaggtatggtcctgtgaccgccccaccccaccactgcttttcctggaggaaatggggacagtggtgccatttgcaatgtggctccatctggagtatcacgtgcaccaatcaattcaatgagacccttgtgctcactgctggattgtgcgatgaacttactgcatctgtcctcaagaaatgtatggtttagaaaagaagtaagacatttcacacaaaatgatcagagcagtcattctgagtttctctttccgcccccacccacattatagacggcaccaaaatgtatgtttctcatgggcttgtatgaacccatcctccctctgctcccaactttctcccctgcgtcatgaaatcttttggaaagcaaatgagtaaaaatgattttaatataggtataagtttgactctacctgttttaatagaagtaagctatttccaagttttagtattctaactactataaatgacagtttcctttcagtgcctctttttgtttgtttgtttttgagagggagtctctctctgttgcccagcctggggtgcagtggcgtgatctcagctcactgcaacttctgcctctcaggcttaagtgatcctcccacctcagcctcctaagtagctgagaccacatgaacatgccaccacacacaggtaatttctgtattttttgtagagatggggtttcaccatgttgcccaggctgacctcaaattcctaggctccagcaatctacccacctcagcctcccaaagtgctgggattacaggcatgagccaccacacccagctcaacacctcttagtggataatggttgagaatcaatatatgtactagaaagcgaatctaagacaatgttataattgtgctatatgtcagccttgttgtttcacatgtaaatcttagagttttatcacgtcacaaatgttcccaagaatacacaataaaagtcaagaaattgtagcttgtcatgaattaaatgaattacttgtaaccaaataatttcaaaagcaaaattataaaaatgctttcaactgttttcatagaaaaataaatatatatttaatgtttaatgagcatttatcttcacatttgatttaatgcagggtgagctgaagagttaaaagggtttaaaaggtcttgcttaaaccatcctccaaactatgtccctattttctttaaaatcacctgagcaggatatcccacagtcactcttgtttacatgctccacagcctgaagtttcaggtttaagacattgcaaaacaaccttttagagctggaagagatcttgttagctggaaggctcctaggctggttgagcaggaggagagctctgggggtgtcaggggcaggttggggacaggagacgttcttaagagcagaagtagtaccagtagcgtgcatgctgcctcagtttttcttggtgtattaaagacttgtgtggcctcatctccactccttctccaactaaattaaccctattctttttatttttattccactttctaaacggtttcccattttcatcgccctgccaagacctcagcagctctctaaaccaaacactgaaatgctcaaagtgagaaaactgtttctttctctccagggcaggattgtgtcttaactgtggggctgccctgacaaatcacctttaactcacaggtctactatccttccagatctaaagaacgtcggcctaatcggttcttggcctattttggaacggggcatcagaccatatgcagtggccattgagtaacagtgatccagcccgtgctgttttggattctgagtccgctctcagcagcaagctagatgttttggtctggggcatatgaggcaaaagagaagtagaaaatgtggctctgcagtcacgaagctcatgccaaaggggagaggcacgaagcagtaaagaatgcagttgtgctaaattatttggtgcaggcaaagaactggcgtttgcagaagcccagtgcccctggagcaacctcaaccaatgggtagaatgtggactggcaggaggaaggggcattccaagtcagggatcagcggcagtccagacagggagagggtaggtgttggtgagttcccaaaggtgtggacctggctggatggaagagatgtggactggggacacaggtggaaagtgaggtgaccagaatatgaggccctaaaagccacatgatggggagcggggaggtctgtgatgtgatgcaaaaacaaacctgaactcctggggtgatttttgaacagggggaggcatggccaccgctgggccgtagtgtgtggcagatggaggcggatatgtcacatcatgtaatcgccaccattgtgtggtcacagaatcatggtcggggaaactagatcagcaggtctatggggcccttcaagctaatctggactgaactccttttttaaaaatgtctttttagtttaattttcatttccaattaatcccactcctccccgttttcaaagtaatgcacatgtaatttagaaaactctgaaagtacagaaaagaatacagaaacaaacaatttctcatccacatccccagagtaaccataaccagtgccacctgtttccctccagtctgcattttcacgtgctactttctttacatggttgggattaaacagtatgaataacccaactgtccattagctatgtgagtttgaatacttttagtaacaggatggtttatcttttttggtaactaggatctcactacatttttaggtatgccatgcctttttaaatagagagcaaaataaaaatgtttttccattatgaagtaatatatgcttatctagaaaatatgcaatattaaaaactgtaatactttaaatcactcataatccaactgttcagaaattaccactgtgaatattttggggtattttcttcgagtattcttccaaaataatatgcattttaaaaacaaaattggaattacaccatatacaatttgaatcttgctgcctttatttatcaaatcatagatgtttccatttccacctcacatttattgagtacttagcatgaaccaagctatttaaagcattttacccatattaatttacttattcctcacaacaactttttgagataagtacaactttttaatctcgccttcacagacaaggtaagaggcacagaaagtaggatttggagacaaatagtctgactccagactctgcgttcctgtccacactactgcctctccaattggtttttagtgaaacttccttctaccaatctgacccgtgttccactggtccttgttcaaaccctcgaagccccccaccaaacacacacacatacacaagtccaatctcttttccatgagacagcctttcaaataggaaagcagctttaaagtcctcaagtcttttctaagcttaacattcttatctctgctattcttcatgttccgaaggccctttgccatgttaggtactcaggcaggtctggttcttccatgtcccattaactgcgtagctagaaacaaatgcacggctgtggtgtaacctgcccaaggaagtctggggtcagcctctccatctgtgtgtgagagacatcagacagctgtcagtgtagccggagctgcactggcttttccatatagcagctgtgctgcagtaaacacagtgcttctccacattcttcagcccctcacagctctatggtctggctcgtctggccttttgattctttgcctggtcctgcagagcacagcccagaagaaaggaagagttgccaagggctttagctcagctgggctgagaactttcatgacatcctggtggggaccaaaatagtcatcaggacagaaggggagacccagggctggtcacaggattggcagcagggccagcaactgccccatcagcaccagcatttctccatatggcttccaagttttgcactaagatatcccaagaaattatcaagacttcagagccaggccaggcacagtggctcacacctgtcatctcagcactttgggaggccaaggcgggggaattgcttgaagccaggagtctgagaccagcctggccaacatagtaaaactccatatacacaaaaaataaaacattagccaaaagtggtggtgcacacctgtagttctagctactcgggaggctgaggtgggaggatcacttgagcccaggaggtcaaggctgcagtgagctacgatctgctgtgctggagcgccactgcactccagcctcctgggtgacagagtaagaccctgtctcaaggaaaaaacaaaaaacacttcacagccagtgtgccagagtccaagcccacaggagggatcagtgaggaaggaagctctgggcactggaactacacaaatggcactttcaagtcaggaccatcttccatctctgggtctgtttggaaaaaaagaaaagcagctttgtttgtctttcttctggcactgaccactggaatttgggctcaaggcaggctccaggtaaaattgtcaaggtcatgggctttgttcttaacgtcttcctcccttttgctttctcctggcccagccgctcctattttctctaagggtcctgatagaggagggagagtaacctgataatttcatattaaggcattccaggtaggcagaggtttaatttgtcacccctctcagagtaatatccttttaacagtaatctcttggattccaaaatgcttctatctaaaaatattttcagcaggaggagagctttcagctatccctcaaattacaacagtggggccaatagcctcttccatctatgtatgataagaacaaatactacaaatttggcactgtaacctttacatctttgccccttaacttccacacgtgtgagatgaggataatcataaaacatacggcatagggttttatgagaatcaaatgagataatgcatagaaagcccttagaatgaacctgaaacataataaaccttctatatgtgttagatgttattattattattattttgagacacagtctcactcttgcccaggctggagtgcagtggcacaatcataactcactgcagctttgccacctcagcctcccaagtagctgggactacaggcatgtgccaccacgcctggctaatttttctatttttttgtagagatggggtttcactatgttgcacaggctggtctcaaacttctcagctcaagagatctgcccgcctaggcctcccaaagtgctgggattacaggcgtgagccaccatacctggctgctagctattattatcactatgaattgttattttaatcacagagaagaatcctatatattatactattttatcctcacaaaaatcctgtgaattaagaatcattggtcctattttatagataaagaaagaaaattaagagattaagtatgcagctaagtaagacatgacacagagccaagagctctctgaaaggctcattctatttgcttggtagggcttggggagagtgcacagtgggccatccctgggcctggtgtaccagagggtataagagaagccaagattcagagtccaccctcaggaagctcagcagaatctgagaaggtgtcagcagcccaagaaaggcgccatttcaacccataatgttatagcgcttcacttctcaccaactgcttttcttctgaagggggaccccaggactattttccaggacaactcttcctgtttcaacatgtagaaaagtaaagaaaataatataataaactacatatacatacgttagtgtgtatttccaaaagataagcaccctttaaagaaaaaaaatatatactatactaccattatccctcctacaaaatttacagtaattccttaatatcatcaaatatcaagttggtgttgaaataatttctctgtctcatgttttttacttcacagttcattttatccaacaaagacagtttctctgtctcttgcatatctagaattccttcccccacagcccgacccctctctttatttctttgaactgtacgaagctaggttatttgtgccatagaatctcccacagtgtgaatttttgctgattgcatccctgtggtgtcatttaacgtgttcctctgcctcctgtgttttttctaaactggctgttgaatctggaggttgatgggattcaggtttaatgtagcaagaacatttcaaggtggttattgtactttcctcaggaggcttgtgatgtgtcctgctctttcttttggtgacaccaaaagccactgataatcattgcctagagcctctatttcattagggattatctttcctttttcatttgtttgctggaatatttctatagagagaaacttacccttgttaactatttggttaccctgataaatgcccaggataagtgttcgatttcttccctttatttataatgatttattatttatagataaaatgacatgatgcctgtgatttgattcaaaataatccaggggagaggggactgggtagggatatagaaaaacaggaagagccgtgagctgatcatcgttgatgttgtgcgacaggtgcacagaggctcattctactattccactcttatgtgtgtttgataattttataataaaaatggtggggttttttcccagtaaaaagttaagtaataatttggttccttagcatcctccaagggtgagcaataagtatgttggttggttggttttagggttgtgataaatgtaggaacataaaaatatttgacagttttgccgggtgcggtggctcacacctgtaatcctagcacttcgggaggctgaggcgggtggatcacctgaggtcaggagttggagaccagcctggccaacttggtgaaacctgtctctactataaatacaaaaattacccgggcatggtggtgggcgcctgtaatcccagctactcgggaggctgaggcaggagaatcgcttgaactcgggaggcagaggttgcagtgagtggagatcgtaccactgcactccagcctggggacagagcaagactccgtcaaaaaaaaaaaaaaaaaaaaagacagttttaacccatggcagtcgtttttcttatatgctcaagttgttccatcgttggccagtgggagcctcttcaagctggctcccaaatactttttgaactgagtccagtagtcttcgctggtgtctgtgctttcagcgggccaaggtgtcccatttgtgtgcatttccttcccagaccgggggctcagccagttttctgaagtagggctcttgtctttcactaaagatcttttctgtggcatgactctcatcattcctgcctggccactgttatctaaaaagatctctttgagcctccagttaggttctgtggccagaagcagaatttttctccccacaccccaaacaagtgtgcctctgccaccctctaaccccactaccgctaccctcccacccctacccaagcaggtgtctcagtgatgcgttgactgtgctggtgggtgggtggaagggaaaggagattaaggagattaaaatctgactttaaagtctcaggcagtaactttgcctgaggctggctcccccttcccagccccacccccagactcagagccagggagaagaaaaagagggcagtgagactattcagtatctctatccatctataattaggcagatttctcttgcgaatgaaatcagagagaaatatttaggaagaaggaagtggggtatctctggttcacacggctttatctagtcttccgggggtggtgaagggagagggtgtgcagagcaggcagagccctccagagacaagtacaagatgaaaacggcatagaagaccaaaagggcacaggccaggagcagccatcagatatgcaaggtgcaaccaagtagaagatgagagtgtagtggttaatttccaaggccagagctagcagatccgtgagtcagtgtgacaaggaggctggtgaccagtaaaaccccccagcaaaggagtgaggggctgcaatgtgcaagaaggggttccccttcacagtgagagctcctcaaagtctggggggtctccagtcaggaatgcttaggtgaggggtttctataccctgaccagacacacatcataatcttgcagagcacagtgacccttggctgaaagagagaacgtggacttgcctgtggcagagcagaaaagacctaggactcccagttctgcacgaactccccagctgtgtgaacttggtctgggctgttccttcccatttttttttctaatgggaataataacagcgcctcattctcaagctgcagttggggttgaaggagttggcgagaagctctgtgaatcactggctgtgagcgcggctaaatgacatttctcctagtagcctgtgggcgtgggtggtctgcaggtaggcaggaagcaaccttattttcgaaacaatatgcaggttgcagctgccctcagatgggccttggaggagagaaaggcccagagagaaggagatggcaagcagggagcaggagaaaccacacttgccccctgggcggtggagggcagctcgggacagctggctatctcaggtcagagaaccacccagagggtgtaagagggagtgtgaacacagaaccacagctcttcaaggaaaggcctcagaatagatctccctgtaagactacagatgggtgtgtgtgtgtgtgtgtgtgtgtgtgtgtgtgtaaaacttgaagaagacgcctaaggagtagacatctgatatccttcaaggccccagctgtagaatacttgtgtgggctggagggcaaaggtggtcaggccagaggagcaggtgggcaggggctgccgggaaggccaaggaattccacacactagcaaatgttcactgatctttcatgcaggcaacacaggtgtggacacacaaagaatcctctctaggccatgggggtcactaggccatgaggacaccaagccgaacaggccctcacagtgtgtgggagtggcaggatcagacacaagagggtcagacacaagattagtaatgttgtgtctccctcaagaatatctgcatatttagagcgcttccaacagatgcctttgcccactttgattttacttctttaaagaaaactgtgataaatacacaatctgcagtaggacctgacttcaacagccagcaaaatcctaatagatgtgcaacaataccctccctcacccagctatgaaacagaattcttcgcttcgttgttactgtccccttgaaaaaaaaagtccacattttgctttcttaattgtaatgcatttaaatagataaaataaattttgctagacttgctttcccgcatgtgcacacactgtgtgtgagtgcatacaaacacatttggccataggcataattctgccaacctgaactgcagcctaaaacacttcctaatttttttattgtgagcgttttatcaggacattgaaaatagtacccccaagaaaatataagtgaatgatctttgatctcaaaatgaggaaagattttctaagcaaaaatctgatgacttaaatttcaacttctatgtgccaaagacaccaaataaaaggtagatggtaaagagggaaaatattcacagtatataccataggaaaaggatgaatccttaatatgtaacacgctcttagaaatcatttagggctggacacagtggctcatgcctgtaatcctagcactttcggaggctgaggcgagtggatcacctgaggtcaggagtttgagaccagcctggccaacttgatgaaaccccatctctactaaaaatacaaaaaattagttgggtgtggtggtggtcacctgtagtcccagctactcaggaggctgaggcaggagaattgcttgaatccaggaggcagaagttgcagtgagccgagatcgcactactgcacttcagactgggtgacagagcaagactcagtctcaaaaaaaaaaaaaaaaaaagaaagaaacagaaagaaaaaaaaaagaaatcactttgtaagagggtacatcaaaagaaaaataaagccgagtgtagtggctcatgcctgtagctccagctaccctggaggctgaggctggaagatcgtttgagcccaggagttcaaggctgcagtgagctaggaacataccactggactccagcgtgagagacagaatgagacccccatctctaaaacacataaacaaaatataagcaaaagtcatcaccacacaattcataaaataggaaatacacagggtgaagaaaacacatgaaaaaaatgttcaacattgctactattcaaaaaaatgcaaattttaaaattagactatttttgcttactgggtaggttgagttgttttgtttgctgtgtgtctgtttaatgataatacccagtgtggtgagaacacaatgaattagagtctctcaaaaactgctgaatgtaaattggttttgtctttctggaaagtaagtcagccctaagtttaaatagcccagaaaatttagagctgaattactttccagaaagatagagccaattttctttaaatttaagggtgagttactttccagaaaaatatatttgtcttttagggtacatgtttccatgtgtcttaatttattctgaagaaataatcacgctgagcgcagtggctcatacctataatcccagcactttgggaagccgaggcaggcagatcacgaggttagaaaatcaagaccatcctagctagcacggtgaaaacccacctgtactaaaaatataaaaaattagccgggcgtggtgatgggcgcctgtagtcccagctactcgggaagctgaggcaggagagttgcttgaacccaggaggtggaggttgcagtgagccgagattgtgccattgcactccagcctgggtgacagagtgagactccatctcaaaaaaaaaaaaaaaaagaaagaaagaaataatcagtggaataaaatatttgtgttcaaggatgttgactgcagcactataatactaaaaatcaacgataacctgcatttctaacaataagggcatagctgagtaaattattatacatagcaatacctcaaaatagtcaaaaaataggtaatactaagaaaaatcaaacaaacacaaaccctaacatatgatcctaattttgaaaaaaaggaaagcagtagaaaaaaacattagaagaaaatatagcaaaatgttaaagattatgtttgagtggttggtttttggctaatttttattttcttttccacgcttttctgtattttccttgtttctttttttttttttttttttttttacaattaacatttttacttctgtaagcccaaaagtcatataggaaataaaaaaaatatttcccccagttttggattgagaaatcaaattcttcctcatgttacccaatgaccctggaaaaggcaggtttgctgggggagaaataaggagttctgcttaggacaagtagagctgagttgtccgttagatattgaatggatgttcaagtctggatttcaggagagaactggggctgtagatctaaatggtggggtcaacagtatacggatgatattttaaagtactgagaaaaggccaggcatggtggctcatgcctgtaatcccaccactttgggaagctgagatgggtggatcacctgaggtcaggagttcaagaccaacctggccaacatggtgaaaccccatctctactaaaaatacaaaaattagctgggcatgatggcatgagcctgtaatcccagctacttaggaggctgaggcaagagaatcacttgagcctgggaggcggaggttgccgtgtgccgagatcgcaccattgcactccagcctgggtgacgagagtgagactccatctcaaaaaaaataaaataaaataaaataaagtaccgagaatgaatagatgaaatcacaaaagaagtgtgtaagattagagaagaggtccaaggcctgagtcttgattctctccaagacatctaggagaggcagagatgccatccaaggaggctgtgccccagtgaccataggaggccaatcacaggctttcaaacagctctgtaatgactaggacatatttattctagaacctcagatcatttgcttgaacactttcctttatctctcactctgctttcaggcctaattattggaagaaaaaaaaaggggtgaggaggggagatctgcattgttcttgaaaataaaatcgcttggaaaacagaaaatgtcagattaaaaaatgcagagtcaatgcccgtgactgtcttaatgagtgtagttaagtgtcccaacatcaacaagaaccacttaagcatactgggaagtaatccaatgccagaggacagggaaagactcgatttccttctccagtgaattcccttgtttaactggatcttacaactgaaaatcaaatacgtctccatcttccaagacaactccttagctctgtgggcccatggtttggatctggacatttggacgatttaaatggactcagtcccacaaatgtataaatgcttcttgccaaactttgggaggctgcactttttgggaggctgagggggggcagatcacttgaggtcaggagttcaagaccagcctggccaacatggtgaaaccctgtctctactaaaaatacaaaaattagccgggcactgtggcacacacctgtagtgctagctactcgggtggctgaggcatgagaatcacttgaacccaggaggtggaggttgcagagagctgagattgtgccactgcactccaggaaaaagacaaaacaaagcaaaacagatcacgtattttttagtggtaggaactcctgttttttttttttttattgcagtttgctcttctctatgtttgggaatgtagcttcctttccctgcttggaaggaaagagagcactttattttttggttcccttaattcacaacaaatcagccgggtggagcatctcagtctaggagcgactgcatgactgggaattttagccactgtggatttgttggttacaatttagcagaaggcagggctaagaacaaaggtgggtaaagaaaagtgagggttctcagccttggtttccctttactgggagcaaagtatcaagggtagaaataccagcccttcccaggtgtctggtgagtgcctgagatgagccaggtgacctgagctctctatgcaagtcactgactgtaactgaaggaagaagactctaaaacagttcctgctgggctaccaggaggctcactttgaggagtcttcgaattaaactgattgatggtctctctgtgtctggaagaggtgttttggcttcatgtcagagctcccatcagagaggcctgagctatgagaggtttgaaaaatgattcagaagaaaaaattgactctgttcaataataaattataacgatgctttgtatttatagagcatccttcaactgagggagtgcgaagttctttatgggtattaacttgcctttctcacaatagagaaaagataattttgtcaattcaatatttgtgtatcttttttctttccttttactgggggaggaggacagctattacagggacgttttcttatattaatttggaggcaataaatcttcccctcattttttttttactggaaatcttttctcattgggtatcacataaagaattaaaaataaatagctatgcctaaaatgtatgtgtatgtgcatttatatgtcggtgtgagcgtagtatcttcataaatatttaatttttactgtctaagccttctccctcagttttcatgagctagaatttattcgccactgaacactgaagctattattatttgcttttgcgcctaaatgatttaaaagtcaattatgaattggctaaggggattggagaactctggcatgtaatacgcctctcatgcttctatttgttaccaaatgtctggaatgagaaagtgtccatgatgggaaatagcccacagaagtaccataccgttattaaaccgaccagacggaggccctaggtcactgggatacgagcaaactgtgctggggttcatgtgggtgggttaggaggctggggagagcatgacaggggatgtgcagacagacaaataaatccgataataaagcagaagctcagaactgtccaaaatgatgactgaaagccagcagcccaaggagaggctgctcttaacagccagcccccaacgcttagggctgtgctctgcaccaacctgccctagtgtcctggggagggaacgtaaacagttcagcgctttctatttaactgcaaagtgctcatcttctgagtcaccgaggcaaagaagcaggctggaaagtagtaataatccaatccaacagaattatctgttgaacagaaaatcccctttggaatttgtgtccttggaacgttccaaatggaaaatgagagttttcaggtgggaaagcaaggcatggtttcatgagtcagggtgactctgcgtttgcatgaagggccgcagaaaagcagattatgttaaccttgaaattagccaggagcgaatggcaaatctttgttaacaagcttggagtccacgataaattttaaaagtgcaccgcaatgagcatctgtaataaatcttccgttgcctcctggttcaggtctgggactgaaaaggataaaggggccgggcgcggtggctcacgcctgtaatcccagcactttgggaggccaaggcgggcggatcacgaggtcaggagatcgagaccatcctggctaacacgtgaaaccccgtctctactaaaaatacaaaaaattagcagggcgcggtggcgggcgcctgtagtcccagctactcgggaggctgaggcatgagaatggcgtgaacctgggaggcagagcttgcagtgagctgagattgcgccactgcactccagcctgggcgacagagcgagacttcgtctcaaaaaaaaaaaaaagaagaggataaagtacttctagaacaggagctaggcctcccgaagcctttgcatgttaactaactaatcaaggggctccagcctgttgggctcacattgcctggtctttactcacttgactttccacaggcctcgctcttgaaaactgaaattgctgcatggcattcattacacacacgtatgtatatatgtgcatatgaaaatacatttgcataggtacctatccatatgtatatacacacatacacacgtttttcctcataaatgaaactggattaaattttatttccaatattcaggtgactcttaaaactgaggggaaaaattggggataaaaagcaggacaaggcaataattatcctgtagcttatctcaaaatggaaatttccccaacaacattagttctaaattctaatatttaaaaaaaaaaagacgaatgtggtacagtattaaaatggacttacatttaatacacagaacatctagcagcttggatcagtacaaactgattttttttctaaaggctatcagagttaattggcaaatagtcagaaaactgtgcaagggggaggaattcttctgtttgtgcatttgtttgattttaggtacttctaagtgctgtgattggtagtaatactgagatctgtgctgagcctcgaactccaaagttgcaactcaaatccctgatgaagttaattaagtctgagtcttgggctctgcagctagttgatgccagaataaatctaacgtgttgtcagcagactgaaccagaagagcaaagctccaaagaggaatttctatgcagtaaatatcacttaaattcctctcaaagttggagctggtgtcaaagtccagaaaagcaatattccctggcaattgctgtcaggagtgtgtgcatgtgcctggccatgcatcatctgaacactcaaattagcagaggaaaaagatagtgagttaatatcacccagctgactgctcaaagaactgctttaactgtagccagagaaatatggagggggcatggccagtcatcaatgacctccaaatgactagatgctcagaagtgtctggcagcctaggctagataaataattcctgctgctgtgaaataaataaattcccccaaataattcagggaaaccaattctttcactgcccagttgctgagctacaagaaactagagcaacactacaggtgaagaagaaagaaaggggctgggtgcggtggctcacgcctgtaataccagaacttttggaggcctaggcagatggatcacctgaggtcaggagttcaagaccagcctggccaacatggtgaaaccccgtctctactaaaaatacaaaaaaaattagccaggcgtgatgccgggagcctgtaatccagctactcgggaggctgaggcaggagaatcgcttgaacctgggaggtggaggttgcagtgagctgagatcaccactgcactccagcagcctgggcaactgaacgggactccatctcaaaaaaaaaaaaaaaaaaaagaaaaagaaaaaaaaaggaaggtggaaggcatctatgagtgactttctatctcactgatctccagtttataagggactggccactggaggcaggttggcctagcagggtggtggggagggggctggcgccttctccaacaactctgtgtatgaggcttgtaaacacatgattctctgtctggataggtctctgaaggagaagaaaggaggtggggaaggaaggaaagaaataaatatatggacaggaagattgagtattggagggagaagagaaaaagcaagagatggtgaaaccaataaaaaggaaataaacgtaaaatggagacagaggggaagaaagagctggaataatactatgtggctctctaaaagttgctgcagtttttttttgttgttatttgttttttgtttttgtttttgttttttacagagcacacactgcagataaatagtgcgatcttggggccttttcggtaactgtacttctattcttctttccctttgcttttgtctaattaaaagtgtctgcctttaaaacagagacaattgaagtttcaagttagtgttgtcatcttctgtccccaggcatttcagagctagaaaaactacaggcaaaattctctgtagatcctttttgtacccctcttcttctactcaccctgtttccccagctttctacttttagaataggagtgggggctgagaaagataaaaatagcttttgagaattcaagttatttgggcccctgttttgggagccagcatccttgtccaaagcagaaagcagccagtcctgagtttgagggaagcttctccccatggagtttccttaggggactatttctgagccgttcttggaggaagcaacccctagagatgttcagaactggaactaaacccatcttcccctgaagaaaaacaggtttttaggaacccatcactcagcagggagccctctgtgtttggagccaagtgtttggggaaacaaataagctgccttcaatcagcctgagttggaaacgcaggaaaaccgcatcttcatgctggactccactgcaatcccaaggtgattttagttcaaggagagtggcatctgcttgggggaaattagaaacttcttatttccatttataaattaggctttactaaggaagagaacttaaaaacagttttattgttgtccactgaaaagacaattacttccagccacaactggcacattccatggtaaaactagcgcaatcaaacacacaacactttccaccgtaggggcttctttttgaggctgtcattaaaggcatgtgtcttattagccagtgtcaggatttctgggatgttttattgtctcgagtaatgagaaggccatttccagggctgtgtgctttttaagtcagcaaacaaaacattaaaaacaaacaaacctccttttctttgtcaccatttctctgaccatcccctgtaaattcgtaggacatggtactcacagaaaaaggaaaattcattagccgaatgaatcgctgatttaaattcaggcaataggttgacattatccttaattgaatagttttagaaaatgaatctatgtagatccagatcaaattctaaccaatcattgcaatggggtcttttttcttgaatgttcaaagttgattttcctccacaaaataatgactctttggtgtccaagtaataaattagcacagttcagttcaagttcccactaaattggaggctgaaatgtaggatcaagagaaaggagatgcaagttacaaacctagattctaaatatcccagcagactaactccatgaaaccatcttttattttttgtgaataagtgtatgtgtgttagcctccctctccctttctccttttaaaaaaagaaatgatgactttttcaggtctctgcttccagatatgaggggctttaggtatttgaagtcagaagggaggcaggaatgagcactgctaattgggtgcatcctggtgtgctaatataaaggacagccaatgtaatcgtgggtttctgagtttgctgtctgtacctggcctgcctggagactaagaaaggcttgctggccccaggccataggtcacattgcagccttgactgtaattccctggacaattcctgcaccagaacagatagtgtgacctcctatgctaaccagccgagagcaacccatgctcagtggcaacgcagaaaagccacaaacagaacccaggaagggttcctgggatggcccggcgactgcccatcctccagagagagctggatcaagcaaaagaagcagtccccaaattcttagggccagggatgccaggtaacctggcacccaaggctatctgaggagacaggcaatgaggctatcaagagtaaagatggaagagcaagcacagatgatggagaaaaaaataaggctggtgggagggaattaaggagggaaatgcaaggaagagacaactgagaggaaaaccagagggaaggagtgtatcagtctgaagacaggatgacacaggagaaggggaggatgagggccggaagggcttcaggcctgcagggagggagggcagacttttccagggggtgggagaattgccctggcccccttttactggtcccattctttggacattgtagagagaactcaggtgggggaaatggcccagcggcgggaaccctggcacacctctcccagcagggatcggcccccaaaaggaacagttctcctccttttctggcttagaccagggcaggccccctgtgcagctctctcccttgggttctcgtgtatgtagatacacttgtttacacacacaggctcctacacaggcacatgcagagacgcctaggtccccaacctgggttgtgacttctgtgtcgaggagagccataggaggcacagctttgccagagttcctgcccattgctgcggcctgttccctaaaccacactggtctggcttcatcgctggactcactgtgtggcccacagaggcctcttctatggtcacagggccccagtgacattttgggaggggcttcagggatgctggctggtaacccaagagcaaccctaaatcccaacttggtccatgtcctagaatatcaaaggagaatcttaaaccctgagtgggatgaggagcctcctaagcttgaagggagccaggtggggagagggcctgggctccatgcaggttgggcatcagttaacctgtgacagtggccaagtcccatgagacttacaccatgctaaatattcagctttcctcctgtgggcatcctatactctgtgaattggtcagaaccaatctttaatccagcatcctatcaggcacacctccctcctgctgctgtgtgcctgaagaatgtggagtgatttagatattcattgacctaaagtgcaactaaggtctgagggtgggggacacaaaagggaggttaatacaaggcatcaaaaatgtactttgactattttctcctttttttttgagcctgtcgcccaggctggagtgcagtggcgtgatctcggctcactgcaacctctgcctcccaggttcaagcgattctcctgcctcagcctcctgagtagctgggactacaggcgcccaccaccacagccggctaatttttgtatttctggtaaagatggggtttcaccatattggccagggtggtctcgaactcctgatcttgtgatccgcccgcctgggcctcctaaagtgctgggattacaggcgtgagccaccacgcccggccgactattttctcttatttcaaaattacatattcttatacactatggaacttggaaaataagggaaagcataaagaaaatttaaatcacccataatttcacaaaccagagatgaaaccactgctaacagttgctgtaatttcttccagtctcttttctacagtgagatctgtatttctagctggctacacatagtataaatctaggtttagaatcaagtagaaatagctctagagtgctgccgatgctgccattggctctgatagtggatctcatttatccctgggtccaggtgagaggtcctgaggacccaaatcatgggacaacagagagaaaaagagaagaggtgacatgcctaggggcggcccggctgagtttggaagccgcaaggtgaactccctcccatgggagaaagctgccatgggaggcggcagcccagcagtctgcctctcagcccacgatcgcccacgtccccagcatgtccccagcgtggcagctgcaggcacggcaggctttgtggggcctttgatccacgcaaagtacgtcataggcgaatgctcacagcgcgtgggctgggcacaccaagggttgccaaactgacaaacacacctccaggaaagccttttggctctggctgggcttcattctggctgcctggacagcatggcctgaataggaaacttgcaaatgtgtgtgccctgtccccctggtgtctcccagcccagactcaggagtaactcagagataactccccgagagttgaacaatgagaacacatggacacagggcggggaacatcacacaccagggcctgtcggggggtcagggggctggaggagggatagcattaggagaatatctaatgtaaatgacgacttgataggtgcagcaaaccaacatggcacatgtatacctatgtaacaaacctgcacgttgttcacatctagaacttaaagtataatttttaaaaaaagaagaaataactcgccgaggccgtgggagtagttagtagtggggcatggggccagctgagaagctggctctcctttctgcacattttggcacacagggcagatttttctgaagcacaggtatattgcccttcaacatctgagacatacggctcttggtcataatcttatttctttttttttatttttattttttgagacagggtctcactctgtcactcaggctggagtgtagtgatgtgatcttggttcactgcagcctggacctcctcgggctcaggtgatcctcccacctcagcttcccgagtagctgggactacaggtgcgcaccaccacacccagataatttttctattttttgtagagacgggatttcgccatgttgcccaggctagtctcaaacccctgggctcaagccatcctcccacctcagcctcccaaagtgctgggattacaggcgtgagccaccacacctggcccataatcttatttttgttcaaactttcagaggattagggagggagagtagaaaacacaggaatgatgccaggaaacctaccctgggttcagccccaaagacaagaattcggggaaaacctacctgacttgatcatttattcattcattaaacccttatgattgcccactgcatggtggttagctggggagtgaagagtcaaagaagaataaaacatatcccaggctttgtggaattctcaatttttaacggggacagacctgtcaccaaatattagtgaaaaatgtgccaagaactacagagcatctgaaaagttagaaatattaccataaacttactttaaaacagaactttagccacattttcaaataatatgctcatgtttttcttcaaccttcacacaccatttcaggaagtatctctacatttaaagcgagtccagttgttaatgtaaaaaaggtacaagaggccagggcacagtggctcaagcctataatcccagcactttgagaggctaaggcaggcggatgacctgaagtcaggagtttgagacaagcctggccaacatggcaaaatcctgtctctactaaaaatacaaaaattagccgggtgtggtgacgtgtgcctgtaatcccagctactcaggaggctgaggcaggaaaatcgcttgaacccgggaggtggaggttgcagtgggctgagatcatgccactgcactccagcctgggtgacagagcaagacttcatctcaaaaaaaaaaaaaaaaaaaaaagagttgtaaggaaaaagccagagaaagtagtgtatttcttgaacctttaaaaaaaattaacaattggacccatttctttacatttagaggtacttcacctgaaaacatatctaaaggttacagaaaaacatattgactgtattatttgaaaatgtaactaatattctgtttaacaataaattctccccatgattttttttttttttaaatttttgagacacagtttcactctgtcaccaaggctggagtgcagtggcttgatctcggctcaccgcaacctccccctcccagcttcaagcaattcttgtgcctcaacctcccgagtagctgggataacaggcgcacgccacaatgctcagctaacagatttttttttttttgtatttttagtagagacggggtttcaccatgttggccaggctggtctcgaactcctggcctcaagtgatccgcctgcctcagcctcccaaagtgctgggatttacaggcgtgagccattgctcccaatttctccatgattcttgacttttaggtcactccatagaacagaaacagatgcccattgtgaaggttcagtgagccaagattgcaccactgcactccagcctggacaagagagcaagaccctgtctcaaaaaaaaaaaaaaaaaaaaaaaaaagaaagaaagaaagaaagaaaaaaacagatgcccatcaaaaggaaatgcattttgctgaaagtagcgcagttttcccagggaaataacatttgagccgagccttgaaagatgagtaaaagttcgtcaagctgaaaaatttcatcgtaagatgagtcgaacacagggtcattgtgagccgttggctggcccccgcagaaacctggcagcccctttcaggtgaacctccagtccattctttattcaggcaccagtaggatgctgtgctgggtggcattcctgccccagcaggggctaggcctgagtcacatgcagggcaggggcctggtcacagcctggggcctcacctgagaaagacctgtgagaaaacattccaatcccactcattcctgcccacaccagggctaggcacgtggggacagcagggacggtgaagagcatgtttgggaatgtgatgttctgtggtggcttgttaggaaatcataagtagctttctcctgatgaccagcttgaacactggatcgctgagcagggcacaggtggaaggaatcagaaattactgtattaacaccagtattttggaggcacagaaacaaggggtgaagcaacttccctaaggtcacgcactttaggtgatagcactggtgtaggctcccataaaaatgttctttcaggtctcttcgaactcataggttcttgaaaatgtgaggggcgaaattccttcattttatggcattaatgaccactaatcaatcaatctttctctcaattatctgagcaattatgtaattactgagtcctagtgatgcctacaactgggcttcctacagtcctgcagtggtagaaacaaaggaactagaaatcacggtgtttaccttggagcaacctacaatctagttgcataggaaagaacccatttgacacaatgagagtaacaaaaacaacgaatgcagttgacattggaatgggctggagctttgggagaaggaatccttaggggaagatgaaagctaagaaaggcttggagaccatcaatggagaggaagggaaaggacagtatctggatggagagctctgggcaatatttaggaagactcaagagcgcctgctcatgaacagatggacagacaagcgtgtgctccctcctgaactcacagacttactggctcacctcacagcagggctccccttccaggctttgcaggtgatatggttccttctccatccaggataactccagtgaaggatggacagaggcaagattctagctccattttggctgcaatgcgtccttgttcttttctcctttgctggtcattctggtctgtttgggaattggactcgttgtctctggtcaactaacctctaaccctgccagggggactaagcatgctacagagcgcccaggtcccccacctcccacttccatatagccctgagcaaaccacttagtgtcagtctctaaatggcccagagcagcttgtggctccattccaggagcaaaagcactgctgagaatgtgcggatgcagcctgagacccccaccatgccagctcctagcgctaaagcaggctggtacctcacactgctttcagaatcttctaagacactgtgggtgtgaggtcttccaggcaggcatcagcacccaccaagccggtcctcagaaaacgactggaggtagagaaagcagggctggaaagagacaaagaaattccaggactgtcctcactagcatattctaaacgaagcagatcttcaggcagccgtgttaggtatgatgtccccgagagagtacacattaacatgacaaagtttgaggaatgaacataagatggccatgcaatgtcaaagtcatggctcacttgggtgcttctctgacagaagagatagagtgtggcaccagtagtccctgttgggttctgtgtctacaacagagagctttggggctgccctccctcacagagcaggctttctgcaaatgctcaggtagggctggatatattcgtagaatcttccagacccatccaacccagaaggtggtggtccccgaagagtggtggtgtacatgagaagctgggggaacgtgttacaaggcagacccctgggccggccttcagagagtctcattcacctgctctggaaacactgctaaggacttggcctctgctgtgagccaagaggaggaaagaaacccctctcactctagaactacctttttctgcctcaaccaccttttttcctgtcttttaaaaatttccaaaattctctgcatctgtagtttttgttaagtactttgtcatgccacctggttagctcaagccagagacaatcaggaaaaagctctatcagtggctgtcaactcagccacttccctccgtaccgtggtccctcattcctgcagctgggtgggagccagcacagccccaggcacaggcagtgccggcatgtattctcggagctccacacaggaatgtcccactctagaagggaagataaaatttagcgctctccatgcactgggtatgtgtgccaggaaagccctgaaacttttgctcacagggctcaaaatgaaagcagctgttgattccgagagtggcaggtttgacgacatttggagtccccctatgtgagaacggagagacccctggcgcttcctccctgctatctgaggaagggggagggggcggggggtgggaaggcccagcctctcagggttgcgtctctccggggcttcccaaggaggcagcgccggccctcccagtcttgccactgtcgccgtgctcgtgtgccgggccagccggagccaggcccgatcctggccactgtgcccaccaccgaaggcaggccccaggccgggtccctctccttgcctgtctgggggaccctggtgtcgggctcctttgatatctaaaaaccagaccctcggcccccagcgccggagcccggcgcagatccacgccctggtctctcagcgcgggggcctgggggcgggtgcggttcggggacaagagaccgcaagtgggggcgggcggcagcgtgtgagcagctcagatgggagatcacgcgcgataacccgggccctggatggcagcgctcgacaggaaacctcgagcgaggagccagctgggggccggcggggcggggctgctgctcccgtaaccgcacgggagccgcggctggcggcaacacggggctgggagcccaccttggctgcatggtgaggaagggccggaggttccttcccaggcccagcctcctctctgtcttgcggagggcgtccttcacgggtgtggtttgtgactttgggacggcggtcccggccgcctgggctttgggcgtagtgggagagctgcccagcccgcagtgcacccggcgtagctttgacccgggagggacccggccccaagccggacgcggggaggccagggcggagaggcggcgtgagcgcggcttagcaggctgaagctcgtctctttaaaatcccagcgaaatattcacctatagcgtatcggtgacggttttaaaatccaagtggcatttcctctcccagcctccgaaaaactcggtgcagtgggcagcggctcggcggggcgtccccctgtgccttgcgtccgggcgggcggcccgcagcgggaggagcccaggcgcgggcaccgaggggcggaggcctggccccggctcggggagctccgggaggagcttgggcttgggctagccgatggatgcacgggtttcttccggggaagctgcgggggccacagggactctgaggaggcgccctcaacagcctgggaccggcaggacggatcccagagcgagggcgaccagcgagcgaggcaggtgcggccctcctggctccccctccgcccctgtcctcccttgcgttgcccaggcagcctgagctcccaaggcccagagggtctccagcttacagttgcagtgggactgattcggtggatcggaaaagcgctttcatctcactcggctgctggtgaaagcatctcgtccttacagcactggataataataacaatagtgatcatgctatttaccagcagtagttggttttctgtgttcatatataaatgtaaccatattcaccaaataccattatcgtgaaagttctgtatagctgaggtccttccaaaccccggcaagtcatcaccagaaatgtactgagccagggctgggcgcaaagcgcttcgctaaatgggccagcccctgttcctccactttctgccctgccagaatcttgccgcacacaccttctttgatgtaagggttcatgttatttgtttttgttttggttgtttagtattataaatattatatactatcatagttagagttccaaacaccacaaaaaggtgtaaggtggaaaataagtgaaattcacccagcctccccctcccgtggctcctctgcagaagtaaccgtggatgacatttttgtgtgtgcggccctccagatatacatatatttttaacgtgttttttcttgtaaaataatataacattactattttcatttttaagtgtaattcagtgacatgaagtaagtacatttacattattgtacaatcatcagcactatccatttccagaacattttcaccatcccaaacagaaactccatctagatatatttttatgtatatatacatatatatgcagcttacatagtgtttttttcatacacaagtatctagagctttttttgtttttgtttttgtttttgaggcagggtctaactctgttgcccaggatggagggtagtggcatgatcacagctcacagcagcctccacctcttgggctcaggtgatcctccgacctaagcctccggaggagggggctggggctacaggtgtgtgccaccacacccagctaattttgttattgtcattatttgcagagacgggtcttgctatgtctcaaactcctgagctcgagaaatcctccagcttcagcctcccaaagtgctaggattacaggcatgagccactgcacctggccaccttttttaaaacctaattatcttgaagatctttcatggtagcacatgtagaattatctgttgtgttttttttaacggttatatatgaatacaccaaaatttatcaggttcctagttgatggacatttacattattttctctgtatactgtgagagtttatcctcagaaaaaattaaattctcagagaaatggcaaaatactgcctggaattttgacataaggggtttgctcgaaagtagatttttttgaaatggtgctaattttcaagagcaaaacttgagggcagtgtgctgcgtgagaaagaacaaaggcccggcaagacctggcttctcgtccaggctctgacacatgagctgtttgactgcgggagagtcacttcacctccctgaccttcagtctctttatctgcaaagtggagcaaataagatctacccggcttacctcactcaattgttgttaggatcaaatgaaataaaaaatataaaagggttttgtaaactgaaagtgtagagcaaatgtttggtatgacaatgattgttacagcatcagtccctggagtcagccagagaaagctacatgtccaagttggcaacaagaggtaagaataagtgtctttctctctgtatatctataatatatatatataatatatatctataatatatatatatgcacacacacacacatacacacacatattgctctctatgtatatatgtacatgcatacatatatgtttgtattgttctatttatgtgtgtgtatatacacatatgtatgcaagtgtgtgtgtgtatcttacactctatgtgcctggcatatagcaagtgttgtctgctaacctgagagacttgtccactggccttggggggctcttggtggaatgagcggagggaactgaaacatgcaacctgctcaccaaaggagatcacttgcctgtcattgtttactcccagagcgtgactgcaggcatcgtccctccctcatgtttccttagcaccctgtgcccctctctcgtgggatgatttgtttccttgcccacctctctgctcggctgggaggctacatctgtgtctgtcacctccaccctcactgcccagcacagtgcgtgacattttctcctagtaaggatggccaccacatgaccactcgtgaggcgccactccttggcttgtaggtggccatctctccctgtgtctttacatcatcttcacggcatcttccctctgtacatgtctgtgtcctaatctcatcttttttttttttttttttgatagagtcttgctccctcgcccaggctggagtgcagtggcacaatctcggctcactgcagcctccgcctcccgggttcaagggattctcctgcctcagcctcctgaagcctcatggtgtaccaccatgcccagctaattttttgtattttattagagatggtttttgttttgttttgttttgtttgagatggagtttcgctcttgttgcccaggctggagtgcaatggcgtgatctcggctcactgcaacctctgcctcccaagttcaagcaattctcctgccttagccttctgagtagctgggtttacaagtgcctaccaccacacctggctaatttttctgtattttcggtagagacggggtttagccatgttggccaggctagtctcaaactcctggcctcaggtgatccacccgcctccacctcccaaagtgctgggaatacaggcatgagccaccgcacccggccgagttggggttttaccatgttggtcaggctggtctcaaactcctgacctcaggttatctacccacctcagcctcccaaagtgctgggattacaggcgtgagccacctcgcccgacctaatcttgtcttcttacaaggacacgagtcatattggatcagggcccccactaatgacctcattttaacttagtgacctctttcaagaccttttcttcaagtacggtcacattctgaggtgttgggagttaggatttcaacataagaatttcagggggcaaaattcagcccataacagaaatggaggcttagggattattagtgttaatggatgaggaaggagcaaaagagtgaatgggtttcaccctttcaggacaaacaaccactttctgggtggtttatggggcaagagtaggaagagcttggttttgaggaccaggggaagaagagatgacaatgactatgtttggctgaatgcagacaggtaatggaggctggcagtatagcctggattttagggctgatttgaagcctgtcctggggcttgccggggcatctccagttagcccaggggcccaaggcaactgtgaaccttgccttgttccagttggctttaattttttctttgaaatgttattaccatattttaaataaaaacataatgtgtccttgtcaaaagagaaaaccctgcagctgttccccatctcattcagagtaaaagccactggccaaggaagttctacctaacaaccccacccgcttgtcgccctctttcctagtctcctagaacttcccctcattcatgctacctacccctgcttgcagttcagagacactgggcacaggtccaccacacagcctttccacctctgctcctctgcccggagtgcccttccccgacagatctgcacagctgaagcccgctctgaccacctgtgaaaaacaggagacatctctttgtcacttcatactttcatttccttggctagcactgagactgtcttttcttttcttttctttttttttttttttgagacagatgcttgctctgtcaccaggtgggattgcagtggctcgatctcagctcactgcaacctgtgcctcctgggttcaagcgattctcctccctcagcctcccgagtagctgggactacaggcacatgccaccatgcctgactaatttttgtatttttagtagagatggggttttaccatattggctagactggtctcgagctcctgacctagtgatctgcctgcctcggccttccaaagtgctgggattggcatgagccactgctcccagtatgtctttttatatgtttgtaagtaatctgtttttctgtctctgcgaattgcctatttatatcttttgctgatttatctcttggactattagtcttagctttcatttttcaaagtattattatttattcacttatttttttttgagacagggtctcactctgtcaaccaggctggagtgcagtgacacggtcagggctcactgcagttttgacctcctgggctcaagtgatcctcgcacctcagcctcctgagtagctgtgactaaggcatgcaccatcatgcccagctaattttttattttttgtagagggagggtcttgccatgttgcccaggctggtctctaactcctgggctcaagcagtcctgctagcttggcctcgccaagtgttgggattacaggcctgagccaccgcacctggcccatttttcaagctattattgatggaattccaatcctgtaaaaagctttaggaatgaagctgttcatcttagaattatttataatggtgaaaaattggaaacaaatgagcaccaatggggaatggttatgtagatagtggaaagcttattaggcaacctttaaaaaggatatttattaatagtaaaatgacaaagtaacatgaaatatgaatatatgaaataacatgaagtcttagattataacataatactaaatgaaaaaaacaattcttcaggaaatttttttttttttgagacagagtctcactttgtcacccaggctgacatgcaatgacgcaatcttggctcactgcagcctccacgtcccaagttcaagtgattctcctgcctcagcctcccaagtagctgggattataggcacgtgccaccatgcccggctaattttcatacttttagtagagagagggtttcaccatgttggccaggctggtctcaaactcctgacctcaggcgatctgcccacctcggcctcccaacgtactgggattacaggcgtgagccactgcacctgcccgtggaaagttgttatgtaaaatgattacagtttataaataacaaagactttggtcagccatctgccatcatattaataatggctgtgtttgaaagtggtattatgggcaattctgattttttcctacttttctgcacttttatattaagttgatttacttgaaaatgaaaagaaaaatgatcacaaaggctgggctcggtggctcacacctgtaatcccagcactttgggaggctgaggcgggtggattacctgaggtcaggagtttgagaacagcctggccaacatggtgaaaccccgtctctgctaaaaatacaaaaaattagccaggtgtggtggcaggtgcctgtaatcatggctgcctgggaggctgaggcaggagaatcgcttgaacctgggaggcggaggttgcagtcagccaagatcatgccactgcactccagcctgggcaacaaagcgagactctgtctcaaaaaaaaaaaaaaaaaaaaagaaaagaaaaatgatcacaaagtatcgctcaaaacataacaactttaatggaaataaaaatacaagaagagaaacatttgctcataaagcactacccctaagaaatcatacagccctgttcttccctcttcccttggaacccttatctatgggaatacataatttgtaggtagttttgaacaaatgatccaattttacaatgaaacatgaatatttgaaatctgacactgaggagagaattaaggaggctgtggtactttttaaaaaaatttttgtttatttatttttttagacagagtctcactctatggcccaggctggagtgcagtggtgctatctcaactcactgcaacctccacctcctgggttcaagcgattcttttgcctcagcgtcttgagtagctggtattacaggcgcccgccaccacacctagctaattttttgtatttttagtagagatgtggtttcaccctgttggccaggctggtagcaaattaaagagagtagtaaaacattatatgttgccagtaaattagctggagtcgttctgcagttcagggtgattgaggtatctccagtgggtcattgctataagcactgggcagtgtgagtcctggcctcacatttggtagcaggccttctgtatctgtcaaccccccaggccggcctctcagccctcaatgaaagaaagctaattgtagagtcaagaatatgacctgctataatggttcgatcctgggagaagggactccacagcctggtgaggacccctctcaccacctctgaggatcagcaagtctttgaaggtcagtaccaagtggtggttaagacctggactgtggatccagatgtgcctggattcaaccctggctgtagacattaggcatgttattaacttctctgagcctcagtttccctagctgtgaaatcagagtcactgtgaagactgaatgagaaaactcacacgtgtggttcctggcccagaacaaatcttcaaccagtggttataactattactctgtgtgtctagcctatatcttttctgctgcagtgaaagttagttattcgatgaaagggagcaacccactgagggggatggtctgggtgcctggatgctgtggtcaatgggtcggcatcacacccagcaccctgcccaacacagacaccgcccccacccccccacccatagctgctgccactgccttcctaagaacagtgacttcctgttttctaagtttttaccctgcaatgtcatcaccagttgtgcctgagcctgggggtggagctggcagcagcaggactcagggctcaaagttggggactcaaaggaaggaaggttggcgagtagaaagctggccactcctacctggatcatgagctactgtgattcatattgattccatcagtgcctacaaactgagcgcttaccaggtaccaagcccttcccatttgagtgtcacacaccctgggaggtcgctgtgattactcagtgattacacagtagcaacaccaggacttggattgcagttgtcgccttcgtaggattcattcttacctgccgtgcttcctatcaaagtggaaacaagctggacgggggtgaggtttgaaaggctgccctatagaaattggaggatctgtgtgatttgtgcttctgaaggcagaactaggttcaaagttttttttttaactctgaaaattagagctctccaccagtgattgctgggtgctgagcttcctgtcaccagagatattcaagcagaggccagaagtgcctaccaaagaagaaactcctgaaagaggtgggaagctctctatatgacaggaaccccagaggcactgggataaggtagattgagaagggactttgcatcagatgcactcagaaaatctctagccatgtgacctattggagccgcaacgtcattatctgcaaaatagaattggtaataattctgcccgtattgtgcaaggttgttctgaggattaagccagatcatgcaagtgcaaagagctctctaaactgtatgcttcatgcatgtgttacatcattatcattttgtgaagtgaggagttctcagaaagtctacacactactgagctcccactgtgtgccaggcactttgtacacacccattatctctttttattttttttgagacggagtcccactctgttgtccaggctggagtgtagtggcgtaatctccgcttactgcaagctccacctcctgggttcacaccattctcctgcctcagcctcctgagcagctgggaccacaggtgcctgccaccacgcccggctaatttttttgtattttttagtagagacggggtttcaccatgttagccaggatggtctcgatctcctgacctcatgatccgcccgcctcggcctcccaaagtgctgggattataggcgtgagccaccgcgcctggcccccattatctgtttttatcttcaaacacccctgaagagtgggtatccccatcctgggctgggaaacctggccaggttctgtccccaaccgtggcatgatggggtgggaggtcagagggccatcccctgctgtcactccttgtacctgcagagcctcttagcatgcgccactgtgcagggcaccccacaaactttacctcatttctctgcacccgtgaaatcggtcttgtcaaagcccttctgcagataggagaattgacgctcagagaggttaagaaaactgttccaaaacaagccaataatggggcagattccacatttgagtcttagagtctttctgactcaaagacttattatgttctttgctcttctctaagcctgtgatgtgcgggtgaggagggaaaggtgcaaatgaaactataaggcaccatctgtgcttgccagagccagtggtggggggcggacttgaagtgaaacgtttacaagccgttgtgactaagtgtcaaaagtgggcaaaatggcaagggctgtgaaatcagaggtaggtggaaactccggatcctgagcccataggtcaggtgcatcgaagccataaggctaagagaagtacctggagtcaggagacccaggaattcccttccagctttgccactaacctgcaggtgtccttggtgaagttgcttcattcctctgatctcagtttatccacctgtgaattgggcccaaaagtagccccctgtttgtctcctggcactcataagaatctaactccatcagacacaggaagtcactttaaaagtagaaattagagttcaaatgagaagaatccttattagttggatgtgagtaagtcccgcagatgcccagctccgaaacaggatttgctggagaaggaggttgactgcaggggaaagggcaccagcgtgtattttcagcctcagggtatggcaggaccaggttgattaaggcctgatccctgttagcagaagttcatagtctggctcagagacagacagacaaacaacgcaattcaagtaaatctcacccagagaaaccagattctgtaaggataggtgcgtctcccccagggtgcactctggggctccagaatcttcctgttagtggtcagtaccatgagacttcctgaattcagggcttttttttaatgaagatgacaaaaggctacaaagggatggcgaggctcactgtcactaattagactcacaacacttagatacaatgacccgtatgcctagatactctgtgatcatctttggctgcccccagcctcctctgagcatctcacatggcctattcctgggatcttgctacagggcaggaaggttccaacttatcgtgcatgggcttaaagtagaaatcatggcagtaacaataggtggcaaaatggaacacatacccttatggggtccttcaccccataagaattattttattttatcctcaccccataagaagtatcatatttggccaggcacggtggctcatgcctgtaatccgagcactttgggaggccgaggcgggcagatcacttgaggtcaggagtttgagaccagcctgaccaacatggcaaaaccccatctctactaaaattacaaaaattagcagggcatcgtggtgtgcacctgtaatcccagccacttgggaggctgaggcaggagaatcacttgaacctgggaggcagaggttgcagtgagctgaggtcatgccattgcactccagcctgggcaacagagtgagactccacttaaaaaaaaaaaaaagtatcgtatttaaccctcaccaccatctaatgagacaggtagtgttgttatccccattttacagatgagaaaacgaaggcttagagaagttccataatacacagttcagaagtacagtgtataagaaggaccaaagctttaattttattgcatctgtttgacagaaatttacatttgttgtagggtatggctgcatctctacagaaggcagggcttccctctcacatgctgtggcccctgtaatgatgcaggtctgaatctcaatccattcatggccatgcagtgaagtccccatgcccaggttccactccaggccacttaagtcagagcctcaggggagagggcggtggattgagagtctgtgtgagaatgctctattagtctctggggctcctttcagatgctgaggttctcctgggtgctgtaatcttgggtagggatcaggaacattaaataaaacagcttctccacttttacagaaaagtagctaccatgtaataccctgaaacctcctaggaagcagctgctggtccctttgggatggaattggtagaaatacgaagaagccacaggagcgcgcacagggaagaagccaggaccaagtagagagtggcgatgcggtgcctttgagctggcatcctgcaaaactgtctgttgtccagggaagctcctacaccttgtgtgcggcctcaagagctaagacttaagccccatgagggcagggactcagaagactcgacccaaatatcagacatcattgtcttttgattctcatcacaacccttaaggtagatatgattaccctccatttaatagatgaggtaactgaggcccagagagggaagtgacttgtccaaaaccacacagctagtaagtggcaagagaagtactcgaacccacctgcacgcaatccagagttcattccatttcaatagttcccggcacagagcagatgcccaatgaatatttaattaattgcgtaactgaatcaggtcctgcatccctgcatggagctttctgggccatgactgtcttcctcaggcccatctctcccagcacaggcatagtgggaccgaggagaggagggtcctacacagggaattatgttggggttaatatcctctcctccacccaaccacacacagcacacttgtcatcagtcataaaactatgcagaaagaaaggaagaaggaaggagggaaggaagaaaggaaggaaacttgttcatattatttatctcagggacatgcccaatccccctgcccctttgtgttgtgctgagtctgcacaacacaaagaaatatttcttatttgtgctaaatttactgtccagtaatttttctgttctcattttctgtgacaagcagctgagtgattttctcctggattttcttctgagtctcaaccagtcccataaatcgccacggttatctcctctgcagtcctcacagcaaaaagtcaccccagctttggtggccttcatgggggctggcttgtcccccagaggcctttagatcgtccctaggtcagtgaggacttccagcaataccttggggccagagggcaggcacacctggggctgggcccagcatcttcctcatcactgaagttcagccctgaaaaattccatgatatcgagtgattgtctaccctgtgccctgcactctgatgctggggctggaggaagaggcaataatgaagatgcagccattggtctcaggtgctgacagcctagatggaggggcatctgagtcctgaggagttgggtttgtagagcgctttgggggatataggctcttgaaccgacatcctctcactttttcctcaggggctcaggtggtgggacagtctgatttcaacaggtgttgagtggaggggtagaacgcaagcctagaaaaagatctagctcagcaggccagggggtagaaaaatatgggtgttcaaggaagaatggggggaaaagacaagagcagagggacagggtggcacaaagctgtggtcttttcaggcctggactggttatggcagagccctaacatggctggacaaagagcttggactctcgtccgagtggctgggtcatcaatggtctctgggcagggtctgtgggaggtttgtagagatcagctgcctgggggcaagaggggtcctgaattagggttggagtcaaaagccaggggacagagggattcagggtggtgggggtggggacactggcggctgcctttgaatcatctgcttccatagttcgtcagggaggccaaaacgttgctggcatggaggggtaggcagggctggcccaggggcaggaagggggcgagaactgctagggatcagtcctgggctgcctgtgaccgtgtgctctgaacccgaatactcggtgcctcagtgtccgagtgtgggtggcaggaggatctgacgatgattacatttaaggcagtgtctgaagaaatgttagttttcaccctgttcaacagaagaggcagctgacagagcatacataacctgccccaaatcacacagccagaaagaatgacagcactcccacatatggcctccactccctctgccctcatctgggtccaaaggccaccagagggcgcccaggccttgggagacagacactagcggggctggcctgggacctctgctctagttaccaggcaggggtggagtgagatgggtaccacaccctgttttacaggttgagttgctgcacgtttacctagtaggaagtatggtcagactaaaatctgagtctcctcattcacagtgcaatgatgttccaaataaaaacactaactttttaaatttttttttgagacggagcctcactctgtgtgccaggctgaagtgcagtggcgtgatctcggctcactgcaacctctgcctcccaggttccagcgattctcctgcctcagcctccagagtggctgtgatcaaagctgccagccaccacgcccagctaattttcgtatttttagtagagatggggtttcaccacgttggccaggctggacttgaactcctgacctcaagtgatacacccatgtcagcctcccaaagtgctgggattacaggcgtgagccaccgcccccagcccaaaaatgcaaacttttatttaaccagagtatttagtgtatctgcattcttcagcccattgtactccaatggcagtgccaactaaacgtgcattaactacagcttgacaaaggttaatatggcactaggagttaggggcccctgggaaatttgcagtgggagaagctaacacagaagggatctttgagctgcattttgtaggatgcatcaaatgttaccaaatagtagggtttcagggagagaaatggagggaacatgaagagggaacagagagtgcaaggcacagggcaaatagtctggaagagcaaggcgtgtcctgggaatggggtgtgtgtagtgggaggaggggagacagagaaggctgaggccatggagctgggactaggggacagggagatgctgggcctaggtggggaggggcaccaaaggtacctctgtctgttggccatgaaacccttcagggaacagggaagggaagccgagcaccagatcccactgtcctaggcgggagagtgcttggcactgaggaggcagggagttgggggagagttaacccagattctctctgtcctagttaactgtcagatattgaaatgatctcatttgaccatcatttgacctattgtctccctgtgggtaggcctcagagccacacacctcaggccaggagtaccattcatccagacgtgaacatcttcccgaggcttccagagttcttggttcacaccggggctaacatggctgggcttctgctgcagtggcaggagctctgtgcacagagaacagcctcatctgctcgccttgtttccacctcccctcccattgccccaggttctttggccccacagcggccacatctgccgttggtgccaataggttttccaggagctggttgaggtgggagggagggagagggttgtgatcaggctgaggcatggggattggatatagtctccgtgtcatgatttatttggtcagtcagtcctagtgccaccctggggtaatggggatgtgttctcgtcaccttgggcctggctgaccagctttatctcttggcacagaggcacagagctttggcctgctggatcccaaactctgctacctgctggatggaatcctcttcatctatggtgtcattctcactgccttgttcctgagagtgaaggtgggtaccactgggctttgggaggagggcacggggtcccccacttgatggatgttcagaggggccttggtcttggaaggtctcaagctcgggtggtgcctggggcttggtatccaggagcaaagcaaggaccagccaagtgtgtgccttgagtgggctgaggaggaggtggcagtgtctggctgagatggacagggtaggagggagagcctggtgctaggcacctccatgacaagccgtacaaatgtgtgcacatcagagtgtcccagggaaggcgatgctactggtgacaaaggggcttacactcaggcagaggtccttctttccaagtgtgaatgaaggccatgttagcctttctcttgaaaaggccctttcctcatctgtaactggggagctgaccagagcgtgggtttttcacttggtgccttgcagaccctggatttcttcgtggggctggtcatggtgtgggcagagattggaagaatttaggagtaaaggggagaatccagtcccagtcatcacttcagtgcttctcaacccatttcttgtttgaattttggactttggcataatattttatttgaaaaaccaaatcttactgagtttcttgttttaagtttgaaaatgctgccctagatgatttctaaggttgtttccaatgctctagatctgtaagacattgcagtttctcccgcctgaagcggcatgaagtgaagcaggagtgaggctgtgtcagcttcccacagatgctcaggacactaagcgaacgcgaggcttcctgggcaccggggcagccgggcgatggctgagggctgggcgagtgatgcacgtacagtacactgctccgggggtcaagataggaggcgggatcttgaccagccgccatccaccctggattgtcctcagagtccccggaggaagggatcctagagaatactcatgtccccgggggcgcagaccaagaaccttatacctctgcgcacgcgcgagggcgctagcccgggaagaataaactccagcgggtcctgggccagcgtgatgaatgcacgtgtcacaggcgggaggaaaaaggacaactgggctcagaaaaaggggctgccacgccccggcccctgcaagggctcagccccaggaggcagggcagcattgttagttgccaaggagcggagtagggctgtccctcgggtcgccgcgcgccctggcaccccggctcccctgcgcgccctcgcggagcagtaacgcgctttgctttctgtgttgcagttcagcaggagcgcagacgcccccgcgtaccagcagggccagaaccagctctataacgtaagtcagcctcgccgtagaccctccggaaaggaagggcagcctcctcctcggacctagggaacgcgcccgccagagtcttgggtttaggtttggtccctagctatcacctctgcgacccggctgcaacttgtttaacctcagttttctaacccacaaaacaggtgtagtaattgtacctgtctcaaagggcgccataaagattacatgctttaatgtcttgatgcatggaacgagcttagtctagtgcctgccactagtgagcccccaagccatcagcaatttgcaaaggctagaggggggtggagaaggaatgtattagaatcttcccagaggaggggaaagcgatttcacactccctgtgcaatgggactgtggtgaaattgactaccacctctgagcccccacttctctatttgctcatgagaatgttgatccttatcccgttggactgatcagcctatagtacttggtgacctttggggatcccatccactgtcatgttaaggcgtgttctctgagatgtcctctgggatgatggtctccagatggaccagttaccatcccctccccagcccctgcccctctttttatgagccaccccagagagggaaaccacactccccagtccagctggctccatccttctgaggttcctccgtcctgtgtctgacactttcttatctgttataggagctcaatctaggacgaagagaggagtacgatgttttggacaagagacgtggccgggaccctgagatggggggaaagccggtaggggttcctctaccttcctgtgtgttcctgcatgtgtggtggggctcagcccaggctgtgggggagggctcctcagctcactctgcaaccagactcgaccctcacatgtgtgggcccgggacaagagaagagatggagacccacttgctgccgcaccctcttccttcctccttggctccattctgcatctcaaggggcctcacccccggacgtggcaccccactgctcatgtctaagctctacccacttcccctcaaactgctccttggccatcctgagatgcacacacggtgacgccatctgccccaagaggacagacctggtgaagaggtccatacaggaagggcccaagacccctggataacccacatatggtcggggtatggtccctggggggtttgacctcttggctttgtagacactatacctgtgggtatacctgtgggtaggggagcagctggatgacaccacagtagggtagggtcctctttgttttttccccttcattctgatttccttccttccttccttccttccttccttcctctgtctttatttattttatattgacaaattatagttctacatatttatggggtacaaagtattgttatgatttttgaatataatatgaaatgattaaattaagctaattaacatatttatcacttcaaatctttaacttttttgtgatgagaacattagcaacttactcttagagatattaaaatgtatagtactcacatattaactatattcagcatgttgtgctgttgatctaaaaataaattactcttcctatctaattgaggctttgtaccctgtgactatcatctccccattccccccattccccagcctctggtaaacatcatgctacctgtccatgcttcagtgagttaaactgttttagattccacatataggtgagaacatggagtgtttgtctttctgtgcctggctgatttcacttggcataatggtctctagttccatccatgttagagtgaataacagaatttcttcctttttaaaagctgaatagtattctattgtgtgtatgttccacagtctctttatctgttcattctttgatggacacttaggttgattccataacttggttattggtttcttttgttttgttttcttttttttttttgagacagcgtttagcttttgttgcccaggctggggtgcaacggcacagtctcggctcaccacaacctctgcctctagggttcaagcaattctcctgcctcagcctcccgagtagctgggattacaggcatgcgccaccacgcttggctaattttgtagtttttttagtagagacggggtttctccatgttgatcaggctggtctcgaactttcgacctcaagtgatctgcccgcctcagccaaccaaagtgctgcgattccaggcgtgagccaccacacccagccttggttattgttaataggactacaatctggaatcacaggtgtaagcccccgcgcccagccgtggttattgttaatagtgctacaatcaacatgggagtatagacatttcttcaacaagcagacttcaaatcttttgggtaaatacccagaagcgggattgttgggtcatatggtagttctatttttagttttttgtggagcctcaatactgttttccataatggttgtattaatttacattcccaccaagagtgttcaagggtttccttttctctccatccttgccaactattgttgtcttttgtctttttggtaatgcgcaccctaacaagtgtgaggtgatctcattgtggttttactttttatctccctaatggttagtgatgttaagcattttttcatatgtctcttagccatttatatgtcttcttttgagaaatatctattcatctatgatttattatggaagttttacagtttcaggccttatgtttaagtctttaatccattttcagttgatttttgtatacggtgtgagataaggtccaatttcattattttgcttgtggatatccaggttttccaacaccgtttattgaagagaccattcatttcccattgtatattcttggcaccttttgctaattgctcggctgggacctatgttactatgttgaatagaagtagtgagtgtgggcatctttgtcttgtttcagatcttagaagaaagggaggaaaggcttcagcttttccctgctgagtgtggtgttagctgtggattggtcatatgtggcctttattgtgtggaggcacattccttctatacctaatttgttgagagtttttagcatgaaaggatgttaaattttgtcaaatgcttttcctgcatctagtgagatgatcatgatttttgttcttcattctgttaatgtggtgtatcatgtttattgatttcgtttgttgaaccatccttgcatcccagggattaatcccacttgatcacactgaatgatccttttaatgtgttgttaaatttgacttgttagggtccttttaagcacagggctcaggacaaaggccagggctgtcctggtgtaagggcagtgctgccagatgctgccagtggtcacgcctgtccatccagcccctgtccaggctgatccctgtgctggttgtgttgttgctagagtgaatgggcagtagagaggctgtcgatttcattgaccactcctcacccccaccatccaagtttatcttgcctcctctcctcttgtcaggactaggagggtgtggggagggcacctttcagtaggcactcactaccagtggctggccctgctccaaatgatggtatgtgactccttttgtcttcagccaaaagtcccacttgtcagcttgtgatgtgtgtgggcgtcccgatggcctgccctgggcaatgctgggcttgggtgggcccctctggaagagcgaagtgtgtatccagttgcaggtaaccaagtatgagccatgtagtgccatgagggccccaacagtggcctaggcaaggctggggtagcacagggaggagagaggcagacggcagagccccaggaaactgcagtcagggggcaggatggggtttgctgtactttcatggcttgggtttgtgtttctctccctctaacgtcttcccgttgtctttcctagcagagaaggaagaaccctcaggaaggcctgtacaatgtgagtagaggagacctcacatttgaccttggaaagttggaggaagggctggaggagggctccagaggaagggctggaggaagggctggaggagggctccagaggaagggctggaggaagggctggaggagggctccggaggaagggctggaggaagggctggaggagggctccggaggaagggctggaggaagggctggaggagggctccggaggaagggctggaggaagggctggaggagggctccggaggaagggctggaggaagggctggaggagggctccggaggaagggctggaggagggctccggaggaagggctggaggaagggctggaggagggctccagaggaaggcggttgctcctcactctgtggtctttgtctgtccagaccttcccttcttggattgagtaatgtctcacctgcttgcggcctgcagcagcacctgcttctagaaagtctccttagctgaaaagtgccgagtaatctcccttccctccccaaaccctgctgctggagttcccaggttgatcagcctggggtgtagggggacacagcaaggtcaagctaggcaaggacgaggtggctggccccttcgaggggctcctgtcctgggtgctgaagtcttctgagtgtcccccgctataggaaggtcaacctcaccctcctgggtgtgaccctgaaccctgattgtcgatctgggttgccatgcaggagacccttgcaggtggcagccttctgtgaaggagatgcctccccgcccctcctgtggggagggagggttgatctacagcccgtttggctgtgtaaagagacaacttgctcagataaatgattctggggctccaggtgagcccttgctttgcccagtctccgtgtctttgtctagaactccacctcctatctttttgagcctaacttgagcccctcagctcagtgcaaagagctggcagctcggaggagactccaaagggctgaggacgaggggggtgggctggagctggttgtgggcagagaagtttgtgtgcataaggtttggagccttgattgtgggagccctccctgtctgccactgctgccaacttggggatcaagaagcttcctgttgtaggggaacctgctgctttctgcattagttggtaaaaatcagtgttccacgccctcttctgcaggaactgcagaaagataagatggcggaggcctacagtgagattgggatgaaaggcgaggtgagtgttgctgtttcttaatttccgagggagttcctcttggtcctccagacacgcctgctgcaggcctcctttcccatccacttctcatcccagctgcaaatgcccatgtggtggccatcagaggtgaaggcgaacctggctgtcacccagccgggcagaacataagaaactaaggaagggctgatgctctttcagtacagaaaaccacatctagattctatgacagcctaagctttgcaaaagcaggtccgttttaataacaggaagcatcgagtgcttaatatgtgctgccgtgttcagtgctcaggaccacaggtcccaggacaacatgaaaacaattcatcaacaattaagaattgttcatcaacaattaattgttcatcaacaattaagaatttcaaaatggtgagagtgaagcattgaccccttccaagcaggggttctctgtagttttatttaattcccacaacaacccaatgagaaacatgtgccctgcaaggcacaaggaggttgagtgacttacccaaggtcttctagctggtaaacgggcacgtgattgaactgactatgccagagctcgtaactgctcaaaacagctggttgtcagtgagcaaaaatgactagccaagaactttaagagctgaagggaagcccatttatctaagcagtaggcaatataggtcctgcgggccctagaccttaggaatctgatgtctgtgaggatctgagtggggtggagcaaacccaagccccatcatggccaggcctcaccttactctgcagagatgaaggtctgaccaggggcctgaggatccttctctcccaggggcaggggtgctgctgggagacagttacctctgacttcctgggtaccttgggaggggcccttgagcagaaatgccactactgactgcctgactttctaatccttttctcatttcactcccaaacaaccagcgccggaggggcaaggggcacgatggcctttaccaggtaggagctgccggcgtcccttcagtggaaggggcaccacctgacaaggggcaagatcaaggcccccacattttgcctgctggtggcaccagctcttgccaacagctgggcagggcaagcccaaggcacccatttaggccagtggcaacgccactgccaataagtccctggagcacagctgggacttggccattcaagcgaattacttggctccaaccatgccttgcttggccatggcagacagagcagcagctgtccagagggtacgcagcctccccgccgatgcagatggaggcaaaggaccacacaagtgattatcctgcctctttgggttcttgtagaaccctcactctgcatcatttccttaggcctagtaagatgagaggttggctgggaagactgaaggaaaaaaagctaagaaaaatggcagcttcaaaaagaaaatgttatgtagttaggtgcctggtttttgcaaatcagtgcaggcaattatgcaaactaagcacggtcaaactacttctctaaaacatgatccccagcgggttgtcatttccctccttctggctcccatgggctgttcatagctcgttcttctgactctagtgtcaggatgcccagcttgcctgagttgagtgatatcaaaagggccccagaaacttacctgtgtgtggctgctgttgatccttctccttcctggcccccggaccagggggacaggcattccagcaggtttggggccagccttgtgggcctgttcgtgaccaagaaaacactagaatcaccgggcctgggaagggaaggaggctcacagagggctgaggccaaggagcccctcttctccctgtgacaagtccaggcttcctttgggcccaggtgtcagggacagcagattctctggagcaggcctgggccctcccccctgattcctgcccaatatgggaggtgggagactcctttctcttaggtccagcaggaagttggcggggcccaagcactgtaaggcacagcatttgaggagctgagaagaggggtgagaatttagctggaaaggagttgctgcaaggccattcccggcagggcacagcacccatctaccaacgaagctgttgcagccaaggctcctgcccgtggggccagggggattattcctgggcctctggaggctgggtgggtggtcacagggctgtgctgcagagacacctgttggcctctgggttggctcctgcccacacaggctactgacccactctttgttttctgatttgctttcacgccagggtctcagtacagccaccaaggacacctacgacgcccttcacatgcaggccctgccccctcgctaacagccaggggatttcaccactcaaaggccagacctgcagacgcccagattatgagacacaggatgaagcatttacaacccggttcactcttctcagccactgaagtattcccctttatgtacaggatgctttggttatatttagctccaaaccttcacacacagactgttgtccctgcactctttaagggagtgtactcccagggcttacggccctggccttgggccctctggtttgccggtggtgcaggtagacctgtctcctggcggttcctcgttctccctgggaggcgggcgcactgcctctcacagctgagttgttgagtctgttttgtaaagtccccagagaaagcgcagatgctagcacatgccctaatgtctgtatcactctgtgtctgagtggcttcactcctgctgtaaatttggcttctgttgtcaccttcacctcctttcaaggtaactgtactgggccatgttgtgcctccctggtgagagggccgggcagaggggcagatggaaaggagcctaggccaggtgcaaccagggagctgcaggggcatgggaaggtgggcgggcaggggagggtcagccagggcctgcgagggcagcgggagcctccctgcctcaggcctctgtgccgcaccattgaactgtaccatgtgctacaggggccagaagatgaacagactgaccttgatgagctgtgcacaaagtggcataaaaaacatgtggttacacagtgtgaataaagtgctgcggagcaagaggaggccgttgattcacttcacgctttcagcgaatgacaaaatcatctttgtgaaggcctcgcaggaagacccaacacatgggacctataactgcccagcggacagtggcaggacaggaaaaacccgtcaatgtactaggatactgctgcgtcattacagggcacaggccatggatggaaaacgctctctgctctgctttttttctactgttttaatttatactggcatgctaaagccttcctattttgcataataaatgcttcagtgaaaatgcagctttactctaa

SEQ ID NO: 89 - DNA, 1147 bp, Homo sapiens
gggggagtgcgaatttcttggccctgtcggcaggtgctttctcaaaggccccacagtcctccacttcctggggaggtagctgcagaataaaaccagcagagactccttttctcctaaccgtcccggccaccgctgcctcagcctctgcctcccagcctctttctgagggaaaggacaagatgaagtggaaggcgcttttcaccgcggccatcctgcaggcacagttgccgattacagaggcacagagctttggcctgctggatcccaaactctgctacctgctggatggaatcctcttcatctatggtgtcattctcactgccttgttcctgagagtgaagttcagcaggagcgcagacgcccccgcgtaccagcagggccagaaccagctctataacgagctcaatctaggacgaagagaggagtacgatgttttggacaagagacgtggccgggaccctgagatggggggaaagccgcagagaaggaagaaccctcaggaaggcctgtacaatgaactgcagaaagataagatggcggaggcctacagtgagattgggatgaaaggcgagcgccggaggggcaaggggcacgatggcctttaccagggtctcagtacagccaccaaggacacctacgacgcccttcacatgcaggccctgccccctcgctaacagccaggggatttcaccactcaaaggccagacctgcagacgcccagattatgagacacaggatgaagcatttacaacccggttcactcttctcagccactgaagggccagaagatgaacagactgaccttgatgagctgtgcacaaagtggcataaaaaacatgtggttacacagtgtgaataaagtgctgcggagcaagaggaggccgttgattcacttcacgctttcagcgaatgacaaaatcatctttgtgaaggcctcgcaggaagacccaacacatgggacctataactgcccagcggacagtggcaggacaggaaaaacccgtcaatgtactaggatactgctgcgtcattacagggcacaggccatggatggaaaacgctctctgctctgctttttttctactgttttaatttatactggcatgctaaagccttcctattttgcataataaatgcttcagtgaaa

SEQ ID NO: 90 - protein, 160 aa, Homo sapiens
MKWKALFTAAILQAQLPITEAQSFGLLDPKLCYLLDGILFIYGVILTALFLRVKFSRSADAPAYQQGQNQLYNELNLGRREEYDVLDKRRGRDPEMGGKPQRRKNPQEGNELQKDKMAEAYSEIGMKGERRRGKGHDGQGLSTATKDTYDALHMQALPPR

SEQ ID NO: 91 - DNA, 1724 bp, Homo sapiens
gggggagtgcgaatttcttggccctgtcggcaggtgctttctcaaaggccccacagtcctccacttcctggggaggtagctgcagaataaaaccagcagagactccttttctcctaaccgtcccggccaccgctgcctcagcctctgcctcccagcctctttctgagggaaaggacaagatgaagtggaaggcgcttttcaccgcggccatcctgcaggcacagttgccgattacagaggcacagagctttggcctgctggatcccaaactctgctacctgctggatggaatcctcttcatctatggtgtcattctcactgccttgttcctgagagtgaagttcagcaggagcgcagacgcccccgcgtaccagcagggccagaaccagctctataacgagctcaatctaggacgaagagaggagtacgatgttttggacaagagacgtggccgggaccctgagatggggggaaagccgagaaggaagaaccctcaggaaggcctgtacaatgaactgcagaaagataagatggcggaggcctacagtgagattgggatgaaaggcgagcgccggaggggcaaggggcacgatggcctttaccagggtctcagtacagccaccaaggacacctacgacgcccttcacatgcaggccctgccccctcgctaacagccaggggatttcaccactcaaaggccagacctgcagacgcccagattatgagacacaggatgaagcatttacaacccggttcactcttctcagccactgaagtattcccctttatgtacaggatgctttggttatatttagctccaaaccttcacacacagactgttgtccctgcactctttaagggagtgtactcccagggcttacggccctggccttgggccctctggtttgccggtggtgcaggtagacctgtctcctggcggttcctcgttctccctgggaggcgggcgcactgcctctcacagctgagttgttgagtctgttttgtaaagtccccagagaaagcgcagatgctagcacatgccctaatgtctgtatcactctgtgtctgagtggcttcactcctgctgtaaatttggcttctgttgtcaccttcacctcctttcaaggtaactgtactgggccatgttgtgcctccctggtgagagggccgggcagaggggcagatggaaaggagcctaggccaggtgcaaccagggagctgcaggggcatgggaaggtgggcgggcaggggagggtcagccagggcctgcgagggcagcgggagcctccctgcctcaggcctctgtgccgcaccattgaactgtaccatgtgctacaggggccagaagatgaacagactgaccttgatgagctgtgcacaaagtggcataaaaaacatgtggttacacagtgtgaataaagtgctgcggagcaagaggaggccgttgattcacttcacgctttcagcgaatgacaaaatcatctttgtgaaggcctcgcaggaagacccaacacatgggacctataactgcccagcggacagtggcaggacaggaaaaacccgtcaatgtactaggatactgctgcgtcattacagggcacaggccatggatggaaaacgctctctgctctgctttttttctactgttttaatttatactggcatgctaaagccttcctattttgcataataaatgcttcagtgaaaatgcagctttactctaa

SEQ ID NO: 92 - protein, 159 aa, Homo sapiens
MKWKALFTAAILQAQLPITEAQSFGLLDPKLCYLLDGILFIYGVILTALFLRVKFSRSADAPAYQQGQNQLYNELNLGRREEYDVLDKRRGRDPEMGGKPRRKNPQEGNELQKDKMAEAYSEIGMKGERRRGKGHDGQGLSTATKDTYDALHMQALPPR
